(19) United States
(12) Patent Application Publication
(10) Pub. No.: US 2022/0290156 A1
(43) Pub. Date: Sep. 15, 2022

(54) COMPOSITIONS AND METHODS FOR INHIBITING PCSK9

(71) Applicant: SANOFI, Paris (FR)

(72) Inventors: Bodo BRUNNER, Frankfurt am Main (DE); Kerstin JAHN-HOFMANN, Frankfurt am Main (DE); Sabine SCHEIDLER, Frankfurt am Main (DE); Pierrick RIVAL, Paris (FR)

(73) Assignee: SANOFI, Paris (FR)

(21) Appl. No.: 17/638,339

(22) PCT Filed: Aug. 27, 2020
(86) PCT No.: PCT/EP2020/073961

§ 371 Date: Feb. 25, 2022

(30) Foreign Application Priority Data
Aug. 27, 2019 (EP) 19306036.5

(51) Int. Cl. C12N 15/113; A61K 31/713

(52) U.S. Cl. CPC C12N 15/1137; A61K 31/713; C12N 2310/14; C12N 2310/343; C12N 2320/51; C12N 2310/351; C12N 2320/11

(57) ABSTRACT

Provided herein, inter alia, are dsRNA compositions targeting PCSK9, methods of inhibiting PCSK9 gene expression, and methods of treating one or more diseases associated with PCSK9 gene expression.

### FIELD OF THE INVENTION

[0001] The present disclosure relates to dsRNA compositions targeting proprotein convertase subtilisin kexin 9 (PCSK9), methods of inhibiting PCSK9 gene expression, and methods of treating one or more diseases associated with PCSK9 gene expression.

### SUBMISSION OF SEQUENCE LISTING

[0002] Nucleic acid sequences are disclosed in the present specification that serve as references. The same sequences are also presented in a sequence listing formatted according to standard requirements for the purpose of patent matters. In case of any sequence discrepancy with the standard sequence listing, the sequences described in the present specification shall be the reference.

### BACKGROUND

[0003] PCSK9 is a member of the subtilisin serine protease family. The other eight mammalian subtilisin proteases, PCSK1-8, are proprotein convertases that process a wide variety of proteins in the secretory pathway and play roles in diverse biological processes. PCSK9 has been proposed to play a role in cholesterol metabolism. PCSK9 messenger RNA (mRNA) expression is down-regulated by dietary cholesterol feeding in mice (Maxwell, K. N. (2003) J. Lipid Res. 44, 2109-2119), up-regulated by statins in HepG2 cells (Duboc, G. (2004) Arterioscler. Thromb. Vasc. Biol. 24, 1454-1459), and up-regulated in sterol regulatory element binding protein (SREBP) transgenic mice (Horton, J. D. (2003) PNAS 100 12027-12032), similar to the cholesterol biosynthetic enzymes and low-density lipoprotein receptor (LDLR). Furthermore, PCSK9 missense mutations have been found to be associated with a form of autosomal dominant hypercholesterolemia (Abifadel, M. (2003) Nat. Genet. 34, 154-156; Timms, K. M. (2004) Hum. Genet. 114, 349-353; Leren, T. P. (2004) Clin. Genet. 65, 419-422). PCSK9 may also play a role in determining low-density lipoprotein (LDL) cholesterol levels in the general population, as single-nucleotide polymorphisms (SNPs) have been associated with cholesterol levels in a Japanese population (Shioji, K. (2004) J. Hum. Genet. 49, 109-114).

[0004] Autosomal dominant hypercholesterolemias (ADHs) are monogenic diseases in which patients exhibit elevated total and LDL cholesterol levels, tendon xanthomas, and premature atherosclerosis (Rader, D. J. (2003) J. Clin. Invest. 111, 1795-1803). The pathogenesis of ADHs and a recessive form, autosomal recessive hypercholesterolemia (ARH) (Cohen, J. C. (2003) Curr. Opin. Lipidol. 14, 121-127), is due to defects in LDL uptake by the liver. ADH may be caused by LDLR mutations, which prevent LDL uptake, or by mutations in the protein on LDL, apolipoprotein B, which binds to the LDLR. ARH is caused by mutations in the low density lipoprotein receptor adapter protein 1 (LDLRAP1) protein that is necessary for endocytosis of the LDLR-LDL complex via its interactions with clathrin.

[0005] Overexpression studies point to a role for PCSK9 in controlling LDLR levels and, hence, LDL uptake by the liver (Maxwell, K. N. (2004) PNAS 101, 7100-7105; Benjannet, S. et al. (2004) J. Biol. Chem. 279, 48865-48875; Park, S. W. (2004) J. Biol. Chem. 279, 50630-50638). Adenoviral-mediated overexpression of mouse or human PCSK9 in mice results in elevated total and LDL cholesterol levels; this effect is not seen in LDLR knockout animals (Maxwell, K. N. (2004) PNAS 101, 7100-7105; Benjannet, S. et al. (2004) J. Biol. Chem. 279, 48865-48875; Park, S. W. (2004) J. Biol. Chem. 279, 50630-50638). In addition, PCSK9 overexpression results in a severe reduction in hepatic LDLR protein, without affecting LDLR mRNA levels, SREBP protein levels, or SREBP protein nuclear to cytoplasmic ratio.

[0006] Loss of function mutations in PCSK9 have been designed in mouse models (Rashid et al. (2005) PNAS, 102, 5374-5379), and identified in human individuals (Cohen et al. (2005) Nature Genetics 37: 161-165). In both cases, loss of PCSK9 function leads to lowering of total LDL cholesterol (LDL-C). The effect of lifelong reductions in plasma LDL-C associated with sequence variations in PCSK9 gene was studied, and the data indicated that moderate lifelong reduction in the plasma level of LDL-C was associated with a substantial reduction in the incidence of coronary events and conferred protection against coronary heart disease. (Cohen et al. (2006) N. Engl. J. Med. 354: 1264-1272).

[0007] Double-stranded RNA molecules (dsRNA) have been shown to block gene expression in a highly conserved regulatory mechanism known as RNA interference (RNAi). WO 99/32619 disclosed the use of a dsRNA of at least 25 nucleotides in length to inhibit the expression of genes in C. elegans. dsRNA has also been shown to degrade target RNA in other organisms, including plants (See e.g., WO 99/53050; WO 99/61631), Drosophila (See e.g., Yang, D. et al. (2000) Curr. Biol. 10: 1191-1200), and mammals (See e.g., WO 00/44895). This natural mechanism has now become the focus for the development of a new class of pharmaceutical agents for treating disorders that are cause by the aberrant or unwanted regulation of a gene.

[0008] Due to the importance of PCSK9 in regulating LDL cholesterol and the prevalence of cardiovascular diseases such as hypercholesterolemias, there is a continuing need to identify inhibitors of PCSK9 expression such as dsRNAs and to test such inhibitors for efficacy and unwanted side effects, such as cytotoxicity.

[0009] All references cited herein, including patent applications, patent publications, non-patent literature, and UniProtKB/Swiss-Prot Accession numbers are herein incorporated by reference in their entirety, as if each individual reference were specifically and individually indicated to be incorporated by reference.

### BRIEF SUMMARY

[0010] To meet these and other needs, provided herein are double-stranded ribonucleic acids (dsRNAs) useful for inhibiting expression of a Proprotein Convertase Subtilisin Kexin 9 (PCKS9) gene.

[0011] Accordingly, in one aspect, provided herein is a double-stranded ribonucleic acid (dsRNA), wherein the dsRNA comprises a sense strand comprising a first sequence and an antisense strand comprising a second sequence, wherein the first sequence and the second sequence are complementary, and wherein the first sequence comprises a sequence selected from the group consisting of SEQ ID NOS: 6-11 and 310-321.

[0012] According to another aspect, the present disclosure provides a double-stranded ribonucleic acid (dsRNA), wherein the dsRNA comprises a sense strand comprising a first sequence and an antisense strand comprising a second sequence, wherein the first sequence and the second sequence are complementary, wherein the first sequence comprises a sequence selected from the group consisting of SEQ ID NOS: 6-11 and 310-321, wherein the dsRNA is optionally a small interfering RNA (siRNA) or short hairpin RNA (shRNA), and wherein the dsRNA optionally inhibits expression of a Proprotein Convertase Subtilisin Kexin 9 (PCSK9) gene.

[0013] In another embodiment, the disclosure provides a double-stranded ribonucleic acid (dsRNA), wherein the dsRNA comprises a sense strand comprising a first sequence and an antisense strand comprising a second sequence, wherein the first sequence and the second sequence are complementary, wherein the first sequence comprises a sequence selected from the group consisting of SEQ ID NOS: 6-11 and 310-321, wherein said selected sequence comprises less than 30% GC, wherein the dsRNA is optionally a small interfering RNA (siRNA) or short hairpin RNA (shRNA), and wherein the dsRNA optionally inhibits expression of a Proprotein Convertase Subtilisin Kexin 9 (PCSK9) gene.

[0014] In some embodiments, the dsRNA comprises (1) UUUUAUUAAUAUGGUGACU (SEQ ID NO:6) in the sense strand and AGUCACCAUAUUAAUAAAA (SEQ ID NO:373) in the antisense strand; (2) UAUUAAUAUGGUGACUUUU (SEQ ID NO:7) in the sense strand and AAAAGUCACCAUAUUAAUA (SEQ ID NO:374) in the antisense strand; (3) AUUAAUAUGGUGACUUUUU (SEQ ID NO:8) in the sense strand and AAAAAGUCACCAUAUUAAU (SEQ ID NO:375) in the antisense strand; (4) UUAAUAUGGUGACUUUUUA (SEQ ID NO:9) in the sense strand and UAAAAAGUCACCAUAUUAA (SEQ ID NO:376) in the antisense strand; (5) UAAUAUGGUGACUUUUUAA (SEQ ID NO:10) in the sense strand and UUAAAAAGUCACCAUAUUA (SEQ ID NO:377) in the antisense strand; (6) UAUGGUGACUUUUUAAAAU (SEQ ID NO:11) in the sense strand and AUUUUAAAAAGUCACCAUA (SEQ ID NO:378) in the antisense strand; (7) UUAUUAAUAUGGUGACUUU (SEQ ID NO:310) in the sense strand and AAAGUCACCAUAUUAAUAA (SEQ ID NO:380) in the antisense strand; (8) AUAUGGUGACUUUUUAAAA (SEQ ID NO:311) in the sense strand and UUUUAAAAAGUCACCAUAU (SEQ ID NO:381) in the antisense strand; (9) AUUUUUAUUAAUAUGGUGACU (SEQ ID NO:312) in the sense strand and AGUCACCAUAUUAAUAAAAAU (SEQ ID NO:382) in the antisense strand; (10) UUUUAUUAAUAUGGUGACUUU (SEQ ID NO:313) in the sense strand and AAAGUCACCAUAUUAAUAAAA (SEQ ID NO:383) in the antisense strand; (11) UUUAUUAAUAUGGUGACUUUU (SEQ ID NO:314) in the sense strand and AAAAGUCACCAUAUUAAUAAA (SEQ ID NO:384) in the antisense strand; (12) UAUUAAUAUGGUGACUUUUUA (SEQ ID NO:315) in the sense strand and UAAAAAGUCACCAUAUUAAUA (SEQ ID NO:385) in the antisense strand; (13) AAUAUGGUGACUUUUUAAAAU (SEQ ID NO:316) in the sense strand and AUUUUAAAAAGUCACCAUAUU (SEQ ID NO:386) in the antisense strand; (14) GCAUUUUUAUUAAUAUGGUGACU (SEQ ID NO:317) in the sense strand and AGUCACCAUAUUAAUAAAAAUGC (SEQ ID NO:387) in the antisense strand; (15) AUUUUUAUUAAUAUGGUGACUUU (SEQ ID NO:318) in the sense strand and AAAGUCACCAUAUUAAUAAAAAU (SEQ ID NO:388) in the antisense strand; (16) UUUUUAUUAAUAUGGUGACUUUU (SEQ ID NO:319) in the sense strand and AAAAGUCACCAUAUUAAUAAAAA (SEQ ID NO:389) in the antisense strand; (17) UUUAUUAAUAUGGUGACUUUUUA (SEQ ID NO:320) in the sense strand and UAAAAAGUCACCAUAUUAAUAAA (SEQ ID NO:390) in the antisense strand; or (18) UUAUUAAUAUGGUGACUUUUUAA (SEQ ID NO:321) in the sense strand and UUAAAAAGUCACCAUAUUAAUAA (SEQ ID NO:391) in the antisense strand. In some embodiments, the dsRNA comprises (1) CCAUUUUAUUAAUAUGGUGACUinvdT (SEQ ID NO:176) in the sense strand and AGUCACCAUAUUAAUAAAAdTdT (SEQ ID NO:177) in the antisense strand; (2) CCAUAUUAAUAUGGUGACUUUUinvdT (SEQ ID NO:180) in the sense strand and AAAAGUCACCAUAUUAAUAdTdT (SEQ ID NO:181) in the antisense strand; (3) CCAAUUAAUAUGGUGACUUUUUinvdT (SEQ ID NO:182) in the sense strand and AAAAAGUCACCAUAUUAAUdTdT (SEQ ID NO:183) in the antisense strand; (4) CCAUUAAUAUGGUGACUUUUUAinvdT (SEQ ID NO:184) in the sense strand and UAAAAAGUCACCAUAUUAAdTdT (SEQ ID NO:185) in the antisense strand; (5) CCAUAAUAUGGUGACUUUUUAAinvdT (SEQ ID NO:186) in the sense strand and UUAAAAAGUCACCAUAUUAdTdT (SEQ ID NO:187) in the antisense strand; (6) CCAUAUGGUGACUUUUUAAAAUinvdT (SEQ ID NO:188) in the sense strand and AUUUUAAAAAGUCACCAUAdTdT (SEQ ID NO:189) in the antisense strand; (7) CCAUUAUUAAUAUGGUGACUUUinvdT (SEQ ID NO:322) in the sense strand and AAAGUCACCAUAUUAAUAAdTdT (SEQ ID NO:323) in the antisense strand; (8) CCAAUAUGGUGACUUUUUAAAAinvdT (SEQ ID NO:324) in the sense strand and UUUUAAAAAGUCACCAUAUdtdt (SEQ ID NO:325) in the antisense strand; (9) CCAAUUUUUAUUAAUAUGGUGACUinvdT (SEQ ID NO:326) in the sense strand and AGUCACCAUAUUAAUAAAAAUdTdT (SEQ ID NO:327) in the antisense strand; (10) CCAUUUUAUUAAUAUGGUGACUUUinvdT (SEQ ID NO:328) in the sense strand and AAAGUCACCAUAUUAAUAAAAdTdT (SEQ ID NO:329) in the antisense strand; (11) CCAUUUAUUAAUAUGGUGACUUUUinvdT (SEQ ID NO:330) in the sense strand and AAAAGUCACCAUAUUAAUAAAdTdT (SEQ ID NO:331) in the antisense strand; (12) CCAUAUUAAUAUGGUGACUUUUUAinvdT (SEQ ID NO:332) in the sense strand and UAAAAAGUCACCAUAUUAAUAdTdT (SEQ ID NO:333) in the antisense strand; (13) CCAAAUAUGGUGACUUUUUAAAAUinvdT (SEQ ID NO:334) in the sense strand and AUUUUAAAAAGUCACCAUAUUdTdT (SEQ ID NO:335) in the antisense strand; (14) CCAGCAUUUUUAUUAAUAUGGUGACUinvdT (SEQ ID NO:336) in the sense strand and AGUCACCAUAUUAAUAAAAAUGCdTdT (SEQ ID NO:337) in the antisense strand; (15) CCAAUUUUUAUUAAUAUGGUGACUUUinvdT (SEQ ID NO:338) in the sense strand and AAAGUCACCAUAUUAAUAAAAAUdTdT (SEQ ID NO:339) in the antisense strand; (16) CCAUUUUUAUUAAUAUGGUGACUUUUinvdT (SEQ ID NO:340) in the sense strand and AAAAGUCACCAUAUUAAUAAAAAdTdT (SEQ ID NO:341) in the antisense strand; (17) CCAUUUAUUAAUAUGGUGACUUUUUAinvdT (SEQ ID NO:342) in the sense strand and UAAAAAGUCACCAUAUUAAUAAAdTdT (SEQ ID NO:343) in the antisense strand; or (18) CCAUUAUUAAUAUGGUGACUUUUUAAinvdT (SEQ ID NO:344) in the sense strand and UUAAAAAGUCACCAUAUUAAUAAdTdT (SEQ ID NO:345) in the antisense strand. In some embodiments, the first sequence is identical to at least 15 contiguous nucleotides of UUGUAGCAUUUUUAUUAAUAUGGUGACUUUUUAAAAUAAAAACAAACA (SEQ ID NO:2) and is not one of GCAUUUUUAUUAAUAUGGU (SEQ ID NO: 5), UUUGUAGCAUUUUUAUUAAUAUGGU (SEQ ID NO: 576), or AUUUUUAUUAAUAUGGUGA (SEQ ID NO: 577).

[0015] In another aspect, the present disclosure relates to a double-stranded ribonucleic acid (dsRNA), wherein the dsRNA comprises a sense strand comprising a first sequence and an antisense strand comprising a second sequence, wherein only the first sequence and the second sequence are complementary, and wherein the first sequence is one of SEQ ID NOS: 3, 4, and 13. In another aspect, the present disclosure relates to a double-stranded ribonucleic acid (dsRNA), wherein the dsRNA comprises a sense strand comprising a first sequence and an antisense strand comprising a second sequence, wherein only the first sequence and the second sequence are complementary, wherein the first sequence is one of SEQ ID NOS: 3, 4, and 13, wherein the dsRNA is optionally a small interfering RNA (siRNA) or short hairpin RNA (shRNA), and wherein the dsRNA optionally inhibits expression of a Proprotein Convertase Subtilisin Kexin 9 (PCSK9) gene. In some embodiments, the disclosure provides a dsRNA comprises a sense strand comprising a first sequence and an antisense strand comprising a second sequence, wherein only the first sequence and the second sequence are complementary, wherein the first sequence is one of SEQ ID NOS: 3, 4, and 13, wherein the first sequence comprises less than 30% GC wherein the dsRNA is optionally a small interfering RNA (siRNA) or short hairpin RNA (shRNA), and wherein the dsRNA optionally inhibits expression of a Proprotein Convertase Subtilisin Kexin 9 (PCSK9) gene. In some embodiments, the dsRNA comprises: (19) UUGUAGCAUUUUUAUUAAU (SEQ ID NO:3) in the sense strand and AUUAAUAAAAAUGCUACAA (SEQ ID NO:370) in the antisense strand; (20) GUAGCAUUUUUAUUAAUAU (SEQ ID NO:4) in the sense strand and AUAUUAAUAAAAAUGCUAC (SEQ ID NO:371) in the antisense strand; or (21) GAGUGUGAAAGGUGCUGAU (SEQ ID NO:13) in the sense strand and AUCAGCACCUUUCACACUC (SEQ ID NO:379) in the antisense strand. In some embodiments, the dsRNA comprises: (19) CCAUUGUAGCAUUUUUAUUAAUinvdT (SEQ ID NO:162) in the sense strand and AUUAAUAAAAAUGCUACAAdTdT (SEQ ID NO:163) in the antisense strand; (20) CCAGUAGCAUUUUUAUUAAUAUinvdT (SEQ ID NO:166) in the sense strand and AUAUUAAUAAAAAUGCUACdTdT (SEQ ID NO:167) in the antisense strand; or (21) CCAGAGUGUGAAAGGUGCUGAUinvdT (SEQ ID NO:290) in the sense strand and AUCAGCACCUUUCACACUCdTdT (SEQ ID NO:291) in the antisense strand.

[0016] In some embodiments that may be combined with any of the preceding embodiments, the first and second sequences are each less than or equal to 30 nucleotides in length. In some embodiments that may be combined with any of the preceding embodiments, the first and second sequences are each at least 19 and/or less than or equal to 23 nucleotides in length. In some embodiments that may be combined with any of the preceding embodiments, the dsRNA is a small interfering RNA (siRNA) or short hairpin RNA (shRNA).

[0017] In some embodiments that may be combined with any of the preceding embodiments, the dsRNA comprises one or more modified nucleotides. In some embodiments, at least one of the one or more modified nucleotides is a 2′-O-methyl nucleotide, 5′-phosphorothioate nucleotide, or a terminal nucleotide linked to a cholesterol derivative or lipophilic moiety. In some embodiments, at least one of the one or more modified nucleotides is a 2′-fluoro, 2′-deoxy, 2′-O-methoxyethyl, constrained ethyl (cEt), deoxy, inverted deoxy, inverted dideoxy, locked nucleic acid, abasic, 2′-amino, 2′-alkyl, morpholino, phosphoramidate, or a non-natural base-containing nucleotide. In some embodiments, the dsRNA comprises one or more 2′-O-methyl nucleotides and one or more 2′-fluoro nucleotides. In some embodiments, the dsRNA comprises two or more 2′-O-methyl nucleotides and two or more 2′-fluoro nucleotides in the pattern OMe-F-OMe-F or F-OMe-F-OMe, wherein OMe represents a 2′-O-methyl nucleotide, and wherein F represents a 2′-fluoro nucleotide. In some embodiments, the dsRNA comprises up to 10 contiguous nucleotides that are each a 2′-O-methyl nucleotide or up to 10 contiguous nucleotides that are each a 2′-fluoro nucleotide.

[0018] In some embodiments that may be combined with any of the preceding embodiments, the dsRNA comprises one or more phosphorothioate groups. In some embodiments that may be combined with any of the preceding embodiments, the dsRNA does not comprise a phosphorothioate group. In some embodiments that may be combined with any of the preceding embodiments, the dsRNA comprises one or more phosphotriester groups. In some embodiments that may be combined with any of the preceding embodiments, the dsRNA does not comprise a phosphotriester group.

[0019] In some embodiments that may be combined with any of the preceding embodiments, the dsRNA is attached to one or more GalNAc derivatives via a linker. In some embodiments, the dsRNA is attached to three GalNAc derivatives via a trivalent branched linker. In some embodiments, at least one of the one or more GalNAc derivatives is attached to the 3′ end of the sense strand, the 3′ end of the antisense strand, or the 5′ end of the sense strand of the dsRNA.

[0020] In some embodiments that may be combined with any of the preceding embodiments, one or both of the sense strand and the antisense strand further comprises a 5′ overhang comprising one or more nucleotides. In some embodiments that may be combined with any of the preceding embodiments, one or both of the sense strand and the antisense strand further comprises a 3′ overhang comprising one or more nucleotides. In some embodiments, the 3′ overhang comprises two nucleotides. In some embodiments, the overhang comprises one or more thymines.

[0021] In some embodiments, one or both of strands of the dsRNA comprise one or more compounds having the structure of formula (I):

[chemical structure]

wherein:
[0022] B is a heterocyclic nucleobase;
[0023] one of L1 and L2 is an internucleoside linking group linking the compound of formula (I) to a polynucleotide and the other of L1 and L2 is H, a protecting group, a phosphorus moiety or an internucleoside linking group linking the compound of formula (I) to a polynucleotide,
[0024] Y is O, NH, NR1 or N—C(═O)—R1, wherein R1 is:
   [0025] a (C1-C20) alkyl group, optionally substituted by one or more groups selected from an halogen atom, a (C1-C6) alkyl group, a (C3-C8) cycloalkyl group, a (C3-C14) heterocycle, a (C6-C14) aryl group, a (C5-C14) heteroaryl group, —O—Z1, —N(Z1)(Z2), —S—Z1, —CN, —C(=J)-O—Z1, —O—C(=J)-Z1, —C(=J)-N(Z1)(Z2), and —N(Z1)-C(=J)-Z2, wherein
      [0026] J is O or S,
      [0027] each of Z1 and Z2 is, independently, H, a (C1-C6) alkyl group, optionally substituted by one or more groups selected from a halogen atom and a (C1-C6) alkyl group,
   [0028] a (C3-C8) cycloalkyl group, optionally substituted by one or more groups selected from a halogen atom and a (C1-C6) alkyl group,
   [0029] a group —[C(═O)]m-R2-(O—CH2-CH2)p-R3, wherein
      [0030] m is an integer meaning 0 or 1,
      [0031] p is an integer ranging from 0 to 10,
      [0032] R2 is a (C1-C20) alkylene group optionally substituted by a (C1-C6) alkyl group, —O—Z3, —N(Z3)(Z4), —S—Z3, —CN, —C(═K)—O—Z3, —O—C(═K)—Z3, —C(═K)—N(Z3)(Z4), or —N(Z3)-C(═K)—Z4, wherein
         [0033] K is O or S,
         [0034] each of Z3 and Z4 is, independently, H, a (C1-C6) alkyl group, optionally substituted by one or more groups selected from a halogen atom and a (C1-C6) alkyl group, and
      [0035] R3 is selected from the group consisting of a hydrogen atom, a (C1-C6) alkyl group, a (C1-C6) alkoxy group, a (C3-C8) cycloalkyl group, a (C3-C14) heterocycle, a (C6-C14) aryl group or a (C5-C14) heteroaryl group, or R3 is a cell targeting moiety,
[0036] X1 and X2 are each, independently, a hydrogen atom, a (C1-C6) alkyl group, and
[0037] each of Ra, Rb, Rc and Rd is, independently, H or a (C1-C6) alkyl group,
   or is a pharmaceutically acceptable salt thereof.

[0038] In some embodiments, the dsRNA comprises one or more compounds of formula (I) wherein Y is:
[0039] a) NR1, and R1 is a non-substituted (C1-C20) alkyl group;
[0040] b) NR1, and R1 is a non-substituted (C1-C16) alkyl group, which includes an alkyl group selected from a group comprising methyl, isopropyl, butyl, octyl, and hexadecyl;
[0041] c) NR1, and R1 is a (C3-C8) cycloalkyl group, optionally substituted by one or more groups selected from a halogen atom and a (C1-C6) alkyl group;
[0042] d) NR1, and R1 is a cyclohexyl group;
[0043] e) NR1, and R1 is a (C1-C20) alkyl group substituted by a (C6-C14) aryl group;
[0044] f) NR1, and R1 is a methyl group substituted by a phenyl group;
[0045] g) N—C(═O)—R1, and R1 is an optionally substituted (C1-C20) alkyl group; or
[0046] h) N—C(═O)—R1, and R1 is methyl or pentadecyl.

[0047] In some embodiments, the dsRNA comprises one or more compounds of formula (I) wherein B is selected from a group consisting of a pyrimidine, a substituted pyrimidine, a purine and a substituted purine, or a pharmaceutically acceptable salt thereof.

[0048] In some embodiments, R3 is of formula (II)

[chemical structure]

wherein A1, A2 and A3 are OH,
A4 is OH or NHC(═O)—R5, wherein R5 is a (C1-C6) alkyl group, optionally substituted by an halogen atom, or a pharmaceutically acceptable salt thereof

[0049] In some embodiments, R3 is N-acetyl-galactosamine, or a pharmaceutically acceptable salt thereof.

[0050] In some embodiments, the dsRNA comprises one or more nucleotides from Table A.

[0051] In some embodiments, the dsRNA comprises from 2 to 10 compounds of formula (I), or a pharmaceutically acceptable salt thereof. In some embodiments, the 2 to 10 compounds of formula (I) are on the sense strand.

[0052] In some embodiments, the sense strand comprises two to five compounds of formula (I) at the 5′ end, and/or comprises one to three compounds of formula (I) at the 3′ end.

[0053] In some embodiments,

a) the two to five compounds of formula (I) at the 5′ end of the sense strand comprise lgT3, optionally comprising three consecutive lgT3 nucleotides; and/or
b) the one to three compounds of formula (I) at the 3′ end of the sense strand comprise lT4; optionally comprising two consecutive lT4.

[0054] In some embodiments, the dsRNA comprises one or more internucleoside linking groups independently selected from the group consisting of phosphodiester, phosphotriester, phosphorothioate, phosphorodithioate, alkyl-phosphonate and phosphoramidate backbone linking groups, or a pharmaceutically acceptable salt thereof.

[0055] In some embodiments, the dsRNA is selected from the dsRNAs in Tables 2-4.

[0056] In some embodiments,

a) the sense strand comprises a nucleotide sequence selected from the group consisting of SEQ ID NOs: 578, 585, 587, 620, 621, 622, and 627; and/or
b) the antisense strand comprises a nucleotide sequence selected from the group consisting of SEQ ID NOs: 589, 591, 631, 632, 634, 635 and 639.

[0057] In some embodiments, the sense strand and antisense strand of the dsRNA respectively comprise the nucleotide sequences of:

[0058] a) SEQ ID NOs: 578 and 589; [C027.001]

[0059] b) SEQ ID NOs: 620 and 631; [C027.003]

[0060] c) SEQ ID NOs: 585 and 591; [C027.001#40]

[0061] d) SEQ ID NOs: 587 and 591; [C027.001#58]

[0062] e) SEQ ID NOs: 621 and 634; [C027.003#03]

[0063] f) SEQ ID NOs: 622 and 632; [C027.003#06]

[0064] g) SEQ ID NOs: 622 and 635; and [C027.003#08]

[0065] h) SEQ ID NOs: 627 and 639. [C027.003#47]

[0066] In some embodiments that may be combined with any of the preceding embodiments, the dsRNA inhibits expression of a Proprotein Convertase Subtilisin Kexin 9 (PCSK9) gene. In some embodiments, the PCSK9 gene is a human PCSK9 gene (e.g., comprising the polynucleotide sequence of SEQ ID NO:1). In some embodiments, the PCSK9 gene is a non-human PCSK9 gene. In some embodiments, the PCSK9 gene is a non-human primate PCSK9 gene (e.g., cynomolgus monkey PCSK9, such as that represented by UniprotKB Accession No. G7NVZ1).

[0067] In another aspect, the present disclosure relates to a vector encoding one or more dsRNAs described herein.

[0068] In another aspect, the present disclosure relates to an isolated host cell comprising one or more dsRNAs and/or vectors described herein.

[0069] In another aspect, the present disclosure relates to an article of manufacture or kit comprising one or more dsRNAs and/or vectors described herein.

[0070] In another aspect, the present disclosure relates to a composition comprising one or more dsRNAs and/or vectors described herein. In some embodiments, the composition is a pharmaceutical composition. In some embodiments, the composition comprises a pharmaceutically acceptable carrier. In some embodiments, the composition comprises a delivery vehicle. In some embodiments, the delivery vehicle is selected from a liposome, lipoplex, complex, and nanoparticle.

[0071] In another aspect, the present disclosure relates to a method of inhibiting expression of a PCSK9 gene in a subject, comprising administering to the subject an effective amount of one or more dsRNAs described herein and/or one or more compositions described herein. In another aspect, the present disclosure relates to the use of one or more dsRNAs described herein and/or one or more compositions described herein in a method of inhibiting expression of a PCSK9 gene in a subject. In another aspect, the present disclosure relates to one or more dsRNAs described herein and/or one or more compositions described herein for use in the manufacture of a medicament for inhibiting expression of a PCSK9 gene in a subject. In another aspect, the present disclosure relates to a method of treating or preventing a PCSK9-mediated disease in a subject in need thereof, comprising administering to the subject an effective amount of one or more dsRNAs described herein and/or one or more compositions described herein. In another aspect, the present disclosure relates to the use of one or more dsRNAs described herein and/or one or more compositions described herein in a method of treating or preventing a PCSK9-mediated disease in a subject in need thereof. In another aspect, the present disclosure relates to one or more dsRNAs described herein and/or one or more compositions described herein for use in the manufacture of a medicament for treating or preventing a PCSK9-mediated disease in a subject in need thereof. In some embodiments that may be combined with any of the preceding embodiments, expression of the PCSK9 gene in the liver of the subject is inhibited by the dsRNA. In some embodiments that may be combined with any of the preceding embodiments, the PCSK9-mediated disorder is hypercholesterolemia. In some embodiments that may be combined with any of the preceding embodiments, the administration is subcutaneous, intravenous, or pulmonary administration. In some embodiments that may be combined with any of the preceding embodiments, the subject is a human. In some embodiments that may be combined with any of the preceding embodiments, the administration results in a decrease in serum cholesterol in the subject. In some embodiments that may be combined with any of the preceding embodiments, the methods further comprise administering to the subject an effective amount of one or more additional therapeutic agents for treating or preventing a PCSK9-mediated disease.

[0072] It is to be understood that one, some, or all of the properties of the various embodiments described herein may be combined to form other embodiments of the present disclosure. These and other aspects of the present disclosure will become apparent to one of skill in the art.

### BRIEF DESCRIPTION OF THE DRAWINGS

[0073] FIG. 1 shows qPCR analysis of PCSK9 mRNA expression in untransfected human Hep3B cells, or in human Hep3B cells transfected with increasing concentrations of 14 different test siRNAs targeting PCSK9, as compared to positive and negative control treatments. * indicates siRNAs that showed most potent reduction of PCSK9 expression in this assay.

[0074] FIG. 2 shows qPCR analysis of PCSK9 mRNA expression in untransfected human C3A cells, or in human C3A cells transfected with increasing concentrations of 14 different test siRNAs targeting PCSK9, as compared to positive and negative control treatments. * indicates siRNAs that showed most potent reduction of PCSK9 expression in this assay.

[0075] FIGS. 3A and 3B show the results of cytotoxicity assays for cells transfected with siRNAs targeting PCSK9. FIG. 3A shows the results of the cytotoxicity assay for human Hep3B cells transfected with siRNAs targeting PCSK9. FIG. 3B shows the results of the cytotoxicity assay for human C3A cells transfected with siRNAs targeting PCSK9.

[0076] FIG. 4 shows qPCR analysis of PCSK9 mRNA expression in untransfected human Hep3B cells, or in human Hep3B cells transfected with increasing concentrations of 60 different test siRNAs targeting PCSK9, as compared to positive and negative control treatments. * indicates siRNAs that showed most potent reduction of PCSK9 expression in this assay.

[0077] FIG. 5 shows qPCR analysis of PCSK9 mRNA expression in human C3A cells transfected with increasing concentrations of five different test siRNAs targeting PCSK9, as compared to positive and negative control treatments. * indicates siRNAs that showed most potent reduction of PCSK9 expression in this assay.

[0078] FIGS. 6A and 6B show the results of cytotoxicity assays for cells transfected with siRNAs targeting PCSK9. FIG. 6A shows the results of the cytotoxicity assay for human Hep3B cells transfected with siRNAs targeting PCSK9. FIG. 6B shows the results of the cytotoxicity assay for human C3A cells transfected with siRNAs targeting PCSK9.

[0079] FIG. 7 shows the amount of PCSK9 protein secreted into the supernatant of human C3A cell cultures for cells transfected with increasing concentrations of ten test siRNAs targeting PCSK9, as determined by ELISA assay.

[0080] FIG. 8 shows the amount of PCSK9 protein secreted into the supernatant of human C3A cell cultures transfected with three different concentrations of the siRNAs targeting PCSK9, as determined by ELISA.

[0081] FIG. 9 shows the results of cytotoxicity assays during free uptake of three different concentrations of the siRNAs targeting PCSK9 in primary human hepatocytes.

[0082] FIG. 10 shows the amount of interferon α (IFNα) protein released into the supernatant of human peripheral blood mononuclear cells (PBMCs) isolated from three donors and transfected with the siRNAs targeting PCSK9, as determined by ELISA.

[0083] FIG. 11 shows the in vitro serum stability and relative half-life of siRNAs targeting PCSK9 in 50% mouse serum.

[0084] FIG. 12 shows a summary of the results of the in vitro analysis of the siRNAs targeting PCSK9.

[0085] FIG. 13A shows serum PCSK9 levels over a time course in human PCSK9 transgenic mice treated with a single 10 mg/kg subcutaneous dose at day 0 of the indicated siRNAs targeting PCSK9, as measured by ELISA. FIG. 13B shows serum total cholesterol levels in these same mice, as determined with a COBAS INTEGRA instrument.

[0086] FIG. 13C shows the results of acute toxicity measurements in serum samples at day 3, as determined with a COBAS INTEGRA instrument. FIG. 13D shows the results of acute toxicity measurements in serum samples at day 10, as determined with a COBAS INTEGRA instrument. AST=aspartate aminotransferase; ALT=alanine aminotransferase; BUN=blood urea nitrogen.

[0087] FIG. 14A shows qPCR analysis of PCSK9 mRNA expression in untransfected human Hep3B cells, or in human Hep3B cells transfected with two different concentrations of additional test siRNAs targeting PCSK9, as compared to positive and negative control treatments. FIG. 14B shows qPCR analysis of PCSK9 mRNA expression in untransfected human C3A cells, or in human C3A cells transfected with two different concentrations of additional test siRNAs targeting PCSK9, as compared to positive and negative control treatments. An arrow indicates siRNAs that showed >50% knockdown of PCSK9 at concentration of 0.1 nM, or >85% knockdown of PCSK9 at a concentration of 1 nM in both Hep3B and C3A cell lines.

[0088] FIG. 15 shows the results of cytotoxicity assays in Hep3B and C3A cells transfected with two different concentrations of the additional test siRNAs targeting PCSK9. An X indicates siRNAs with >50% toxicity at a concentration of 50 nM as compared to the LV2 negative control.

[0089] FIG. 16A shows the correlation between the calculated IC₅₀ values in human Hep3B and C3A cells for the tested siRNAs. FIG. 16B shows the correlation between the calculated Iₘₐₓ values in human Hep3B and C3A cells for the additional test siRNAs targeting PCSK9.

[0090] FIG. 17 shows a graph depicting residual PCSK9 mRNA expression levels normalized to a LV2 non-silencing control in primary human hepatocytes treated with 100 nM and 1000 nM GalNAc-siRNAs from optimization libraries based on parent sequences C027.001, C027.002, and C027.003.

[0091] FIG. 18 shows the amount of interferon α2a (IFNα2a) protein (in pg/mL) released into the supernatant of human peripheral blood mononuclear cells (PBMCs) isolated from three donors and transfected with the siRNAs targeting PCSK9, as determined by ELISA.

[0092] FIG. 19A-C are graphs showing relative amounts of serum PCSK9 levels in human PCSK9 transgenic mice treated subcutaneously with a single dose of 42 optimized PCSK9 GalNAc-siRNAs and respective parent molecules at 6 mg/kg at day 0. FIGS. 19A-C represent data for optimized PCSK9 GalNAc-siRNAs based on parent sequences C027.001, C027.002, and C027.003, respectively. Protein expression is represented relative to animals treated with a PBS vehicle control. Human PCSK9 levels were quantified by ELISA, error bars indicate SEM. FIGS. 19D and E show serum LDL cholesterol levels in these same mice at days 14 (19D) and 28 (19E), after siRNA dosing, as determined with a COBAS INTEGRA instrument.

### DETAILED DESCRIPTION

[0093] The following description sets forth exemplary methods, parameters, and the like. It should be recognized, however, that such description is not intended as a limitation on the scope of the present disclosure but is instead provided as a description of exemplary embodiments.

### 1. Definitions

[0094] As used in this specification and the appended claims, the singular forms “a”, “an” and “the” include plural referents unless the content clearly dictates otherwise. Thus, for example, reference to “a molecule” optionally includes a combination of two or more such molecules, and the like.

[0095] The term “about” as used herein refers to the usual error range for the respective value readily known to the skilled person in this technical field. Reference to “about” a value or parameter herein includes (and describes) embodiments that are directed to that value or parameter per se.

[0096] It is understood that aspects and embodiments of the present disclosure described herein include “comprising,” “consisting,” and “consisting essentially of” aspects and embodiments. It should be understood that disclosures of embodiments using the term “comprises” or equivalent also encompass embodiments where “comprises” is replaced with “consists in”.

[0097] As used herein, the term “ribonucleotide” or “nucleotide” includes naturally occurring or modified nucleotide, as further detailed below, or a surrogate replacement moiety. One of ordinary skill in the art would understand that guanine, cytosine, adenine, uracil, or thymine in a nucleotide may be replaced by other moieties without substantially altering the base pairing properties of an oligonucleotide comprising a nucleotide bearing such replacement moiety. For example, without limitation, a nucleotide comprising inosine as its base may base pair with nucleotides containing adenine, cytosine, or uracil. Hence, nucleotides containing uracil, guanine, or adenine may be replaced in the nucleotide sequences of the present disclosure by a nucleotide containing, for example, inosine. Sequences comprising such replacement moieties are included as embodiments of the present disclosure.

[0098] As used herein, the term “PCSK9” refers to the proprotein convertase subtilisin kexin 9 gene or protein (also known as FH3, HCHOLA3, NARC-1, and NARC1). As used herein, the term “PCSK9” includes human PCSK9, the amino acid and nucleotide sequence of which may be found in, for example, NCBI Reference Sequence: NM_174936.3; mouse PCSK9, the amino acid and nucleotide sequence of which may be found in, for example, NCBI Reference Sequence: NM_153565.2; rat PCSK9, the amino acid and nucleotide sequence of which may be found in, for example, NCBI Reference Sequence: NM_199253.2. Additional examples of PCSK9 mRNA sequences are readily available using, e.g., GenBank.

[0099] As used herein, “target sequence” refers to a contiguous portion of the nucleotide sequence of an mRNA molecule formed during the transcription of the target gene, e.g., the PCSK9 gene, or portions thereof, including mRNA that is a product of RNA processing of a primary transcription product.

[0100] As used herein, the term “strand comprising a sequence” refers to an oligonucleotide comprising a chain of nucleotides that is described by the sequence referred to using the standard nucleotide nomenclature.

[0101] As used herein, and unless otherwise indicated, the term “complementary”, when used to describe a first nucleotide sequence in relation to a second nucleotide sequence, refers to the ability of an oligonucleotide or polynucleotide comprising the first nucleotide sequence to hybridize and form a duplex structure under certain conditions with an oligonucleotide or polynucleotide comprising the second nucleotide sequence, as will be understood by one of ordinary skill in the art. This includes base-pairing of the oligonucleotide or polynucleotide comprising the first nucleotide sequence to the oligonucleotide or polynucleotide comprising the second nucleotide sequence over the entire length of the first or second nucleotide sequence. Such sequences can be referred to as “fully complementary” with respect to each other herein. Where a first sequence is referred to as “substantially complementary” with respect to a second sequence herein, the two sequences can be fully complementary or they may form one or more, but not more than 4, 3, or 2 mismatched base pairs upon hybridization, while retaining the ability to hybridize under conditions most relevant to their ultimate application. However, where two oligonucleotides are designed to form, upon hybridization, one or more single stranded overhangs, such overhangs shall not be regarded as mismatches with regard to the determination of complementarity. For example, a double-stranded RNA (dsRNA) comprising a first oligonucleotide 21 nucleotides in length and a second oligonucleotide 23 nucleotides in length, wherein the second oligonucleotide comprises a sequence of 21 nucleotides that is fully complementary to the first oligonucleotide, may yet be referred to as “fully complementary” for the purpose of the present disclosure. “Complementary” sequences may also include, or be formed entirely from, non-Watson-Crick base pairs and/or base pairs formed from non-natural and modified nucleotides, in as far as the above requirements with respect to their ability to hybridize are fulfilled. The terms “complementary”, “fully complementary”, and “substantially complementary” may be used with respect to the base matching between the sense strand and the antisense strand of a dsRNA, or between the antisense strand of a dsRNA and a target sequence, as it will be understood from the context of their use. As used herein, a polynucleotide which is “substantially complementary to at least part of” an mRNA refers to a polynucleotide which is substantially complementary to a contiguous portion of the mRNA of interest (e.g., an mRNA encoding PCSK9). For example, a polynucleotide is substantially complementary to at least part of a PCSK9 mRNA if the sequence is substantially complementary to a non-interrupted portion of an mRNA encoding PCSK9.

[0102] As used herein, the term “double-stranded RNA” or “dsRNA” refers to a complex of ribonucleic acid molecule(s), having a duplex structure comprising two anti-parallel and substantially complementary, as defined above, nucleic acid strands. The two strands forming the duplex structure may be different portions of one larger RNA molecule, or they may be separate RNA molecules. Where separate RNA molecules, such dsRNA are often referred to in the literature as short interfering RNA (siRNA). Where two strands are part of one larger molecule, and therefore are connected by an uninterrupted chain of nucleotides between the 3′-end of a first strand and the 5′-end of a second strand forming the duplex structure, the connecting RNA chain is referred to as a “hairpin loop”, “short hairpin RNA”, or “shRNA”. Where the two strands are connected covalently by means other than an uninterrupted chain of nucleotides between the 3′-end of a first strand and the 5′-end of a second strand forming the duplex structure, the connecting structure is referred to as a “linker”. The RNA strands may have the same or a different number of nucleotides. The maximum number of base pairs is the number of oligonucleotides in the shortest strand of the dsRNA minus any overhangs that are present in the duplex. In addition to the duplex structure, a dsRNA may comprise one or more nucleotide overhangs. In addition, as used herein, the term “dsRNA” may include chemical modifications to ribonucleotides, including substantial modifications at multiple nucleotides and including all types of modifications disclosed herein or known in the art. Any such modifications, as used in an siRNA type molecule, are encompassed by “dsRNA” for the purposes of the present disclosure.

[0103] In some embodiments, the dsRNA comprises a modified ribonucleoside including a deoxyribonucleoside, including, for example, a deoxyribonucleoside overhang(s), one or more deoxyribonucleosides within the double stranded portion of a dsRNA, and the like. However, it is self-evident that under no circumstances is a double-stranded DNA molecule encompassed by the term “dsRNA”.

[0104] As used herein, the term “nucleotide overhang” refers to the unpaired nucleotide or nucleotides that protrude from the duplex structure of a dsRNA when a 3′-end of a first strand of the dsRNA extends beyond the 5′end of a second strand, or vice versa. “Blunt” or “blunt end” means that there are no unpaired nucleotides at that end of the dsRNA, i.e., no nucleotide overhang. A “blunt ended” dsRNA is a dsRNA that is double-stranded over its entire length, i.e., no nucleotide overhang at either end of the molecule. For clarity, chemical caps or non-nucleotide chemical moieties conjugated to the 3′ end and/or the 5′ end of a dsRNA are not considered in determining whether a dsRNA has an overhang or is blunt ended.

[0105] As used herein, the term “antisense strand” refers to the strand of a dsRNA which includes a sequence that is substantially complementary to a target sequence.

[0106] As used herein, the term “sense strand” refers to the strand of a dsRNA that includes a sequence that is substantially complementary to a region of the antisense strand.

[0107] As used herein, the term “introducing into a cell” means facilitating uptake or absorption into the cell, as would be understood by one of ordinary skill in the art. Absorption or uptake of dsRNA can occur through unaided diffusive or active cellular processes, or by auxiliary agents or devices. The meaning of this term is not to be limited to cell in vitro; a dsRNA may also be “introduced into a cell”, wherein the cell is part of a living organism. In such an instance, introduction into the cell will include delivery to the organism. For example, for in vivo delivery, dsRNA can be injected into a tissue site or administered systemically. In vivo delivery can also be mediated by a beta-glucan delivery system (See e.g., Tesz, G. J. et al. (2011) Biochem J. 436(2): 351-62). In vitro introduction into a cell includes methods known in the art such as electroporation and lipofection. Further approaches are described herein below or known in the art.

[0108] As used herein, the term “target gene” refers to a gene of interest, e.g., PCSK9, targeted for inhibition of expression by a dsRNA of the present disclosure.

[0109] As used herein, the term “PCSK9-associated disease” is intended to include any disease associated with the PCSK9 gene or protein. Such a disease may be caused, for example, by excess production of the PCSK9 protein, by PCSK9 gene mutations, by abnormal cleavage of the PCSK9 protein, by abnormal interactions between PCSK9 and other proteins or other endogenous or exogenous substances. Exemplary PCSK9-associated diseases include, without limitation, lipidemias, e.g., a hyperlipidemia, and other forms of lipid imbalance such as hypercholesterolemia, hypertriglyceridemia, and the pathological conditions associated with these disorders such as heart and circulatory diseases.

[0110] As used herein, the terms “inhibit the expression of” or “inhibiting expression of” in as far as they refer to the PCSK9 gene, refer to the at least partial suppression of the expression of the PCSK9 gene, as manifested by a reduction of the amount of mRNA transcribed from the PCSK9 gene which may be isolated from a first cell or group of cells in which the PCSK9 gene is transcribed and which has or have been treated such that the expression of the PCSK9 gene is inhibited, as compared to a second cell or group of cells substantially identical to the first cell or group of cells but which has or have not been so treated (control cells). As used herein, the term “inhibiting” is used interchangeably with “reducing”, “silencing”, “downregulating”, “suppressing”, and other similar terms, and include any level of inhibition. The degree of inhibition is usually expressed in terms of (((mRNA in control cells)−(mRNA in treated cells))/(mRNA in control cells))·100%.

[0111] Alternatively, the degree of inhibition may be given in terms of a reduction of a parameter that is functionally linked to PCSK9 gene transcription, e.g., the amount of protein encoded by the PCSK9 gene which is secreted by a cell, or the number of cells displaying a certain phenotype, e.g., apoptosis. In principle, PCSK9 gene silencing may be determined in any cell expressing the target, either constitutively or by genomic engineering, and by any appropriate assay. However, when a reference is needed in order to determine whether a given dsRNA inhibits the expression of the PCSK9 gene by a certain degree and therefore is encompassed by the present disclosure, the assays provided in the Examples below shall serve as such a reference.

[0112] As used herein, in the context of PCSK9 expression, the terms “treat”, “treatment” and the like refer to relief from or alleviation of pathological processes mediated by target gene expression. In the context of the present disclosure, insofar as it relates to any of the other conditions recited herein below (other than pathological processes mediated by target expression), the terms “treat”, “treatment”, and the like refer to relieving or alleviating one or more symptoms associated with such condition. For example, in the context of hyperlipidemia, treatment will involve a decrease in serum lipid levels.

[0113] As used herein, the terms “prevent” or “delay progression of” (and grammatical variants thereof) with respect to a disease or disorder relate to prophylactic treatment of a disease, e.g., in an individual suspected to have the disease, or at risk for developing the disease. Prevention may include, but is not limited to, preventing or delaying onset or progression of the disease and/or maintaining one or more symptoms of the disease at a desired or sub-pathological level. For example, in the context of hyperlipidemia, prevention may involve maintaining serum lipid levels at a desired level in an individual suspected to have or at risk for developing hyperlipidemia.

[0114] As used herein, the terms “therapeutically effective amount” and “prophylactically effective amount” refer to an amount that provides a therapeutic benefit in the treatment, prevention, or management of pathological processes mediated by target gene expression, e.g., PCSK9 gene expression, or an overt symptom of pathological processes mediated by target gene expression, e.g., PCSK9 gene expression. The specific amount that is therapeutically effective can be readily determined by an ordinary medical practitioner, and may vary depending on factors known in the art, such as, for example, the type of pathological processes mediated by target gene expression, e.g., PCSK9 gene expression, the patient's history and age, the stage of pathological processes mediated by target gene expression, e.g., PCSK9 gene expression, and the administration of other agents that inhibit processes mediated by target gene expression e.g., PCSK9 gene expression.

[0115] As used herein, the term “individual” or “subject” is a mammal. Mammals include, but are not limited to, domesticated animals (e.g., cows, sheep, cats, dogs, and horses), primates (e.g., humans and non-human primates such as monkeys), rabbits, and rodents (e.g., mice and rats). In some embodiments, the individual or subject is a human.

### 2. Double-Stranded RNAs (dsRNAs)

[0116] Certain aspects of the present disclosure relate to double-stranded ribonucleic acid (dsRNA) molecules targeting PCSK9. In some embodiments, the dsRNA comprises two strands, a sense strand comprising a first sequence and an antisense strand comprising a second sequence, wherein the first strand and the second strand are sufficiently complementary to hybridize to form a duplex structure. In some embodiments, the sense strand comprises a first sequence that is substantially complementary or fully complementary to the second sequence in the antisense strand. In some embodiments, the second sequence in the antisense strand is substantially complementary or fully complementary to a target sequence. In some embodiments, the target sequence is derived from the sequence of an mRNA formed during the expression of a target gene (e.g., an mRNA formed during the expression of a PCSK9 gene). In some embodiments, the PCSK9 gene is a human PCSK9 gene, e.g., as described herein. In some embodiments, the PCSK9 gene is a non-human PCSK9 gene. In some embodiments, the PCSK9 gene is a non-human primate PCSK9 gene (e.g., cynomolgus monkey PCSK9 (UniprotKB Accession No. G7NVZ1)). In some embodiments, the dsRNA inhibits expression of the PCSK9 gene. In some embodiments, the dsRNA is a small interfering RNA (siRNA). In some embodiments, the dsRNA is a short hairpin RNA (shRNA).

[0117] In some embodiments, the sense strand and the antisense strand of the dsRNA are in two separate molecules. In some embodiments, the duplex region is formed between the first sequence in the sense strand and the second sequence in the antisense strand of the two separate molecules. In some embodiments, the dsRNA is an siRNA. In some embodiments, the two separate molecules are not covalently linked to one another. In some embodiments, the two separate molecules are covalently linked to one another. In some embodiments, the two separate molecules are covalently linked to one another by means other than a hairpin loop. In some embodiments, the two separate molecules are covalently linked to one another via a connecting structure (herein referred to as a “covalent linker”).

[0118] In some embodiments, each of the first sequence (in the sense strand) and the second sequence (in the antisense strand) may range from 9-30 nucleotides in length. For example, each sequence may be between 12-30 nucleotides in length, 14-30 nucleotides in length, 15-30 nucleotides in length, 25-30 nucleotides in length, 27-30 nucleotides in length, 15-26 nucleotides in length, 15-23 nucleotides in length, 15-22 nucleotides in length, 15-21 nucleotides in length, 15-20 nucleotides in length, 15-19 nucleotides in length, 15-18 nucleotides in length, 15-17 nucleotides in length, 17-30 nucleotides in length, 17-23 nucleotides in length, 17-21 nucleotides in length, 17-19 nucleotides in length, 18-30 nucleotides in length, 18-26 nucleotides in length, 18-25 nucleotides in length, 18-23 nucleotides in length, 18-22 nucleotides in length, 18-21 nucleotides in length, 18-20 nucleotides in length, 19-30 nucleotides in length, 19-25 nucleotides in length, 19-24 nucleotides in length, 19-23 nucleotides in length, 19-22 nucleotides in length, 19-21 nucleotides in length, 19-20 nucleotides in length, 20-30 nucleotides in length, 20-26 nucleotides in length, 20-25 nucleotides in length, 20-24 nucleotides in length, 20-23 nucleotides in length, 20-22 nucleotides in length, 20-21 nucleotides in length, 21-30 nucleotides in length, 21-26 nucleotides in length, 21-25 nucleotides in length, 21-24 nucleotides in length, 21-23 nucleotides in length, or 21-22 nucleotides in length. In some embodiments, each sequence is greater than or equal to 9, 10, 11, 12, 13, 14, 15, 16, 17, 18, 19, 20, 21, 22, 23, 24, 25, 26, 27, 28, or 29 nucleotides in length. In some embodiments, each sequence is less than or equal to 10, 11, 12, 13, 14, 15, 16, 17, 18, 19, 20, 21, 22, 23, 24, 25, 26, 27, 28, 29, or 30 nucleotides in length. That is, each sequence can be any of a range of nucleotide lengths having an upper limit of 10, 11, 12, 13, 14, 15, 16, 17, 18, 19, 20, 21, 22, 23, 24, 25, 26, 27, 28, 29, or 30 and an independently selected lower limit of 9, 10, 11, 12, 13, 14, 15, 16, 17, 18, 19, 20, 21, 22, 23, 24, 25, 26, 27, 28, or 29, wherein the lower limit is less than the upper limit. In some embodiments, each sequence is 9, 10, 11, 12, 13, 14, 15, 16, 17, 18, 19, 20, 21, 22, 23, 24, 25, 26, 27, 28, 29, or 30 nucleotides in length. In some embodiments, the first and second sequences are each less than or equal to 30 nucleotides in length. In some embodiments, the first and second sequences are each at least 19 and less than or equal to 23 nucleotides in length. In some embodiments, the first sequence and the second sequence are a different number of nucleotides in length. In some embodiments, the first sequence is any of 1, 2, 3, 4, 5, 6, 7, 8, 9, or 10 nucleotides longer than the second sequence. In some embodiments, the second sequence is any of 1, 2, 3, 4, 5, 6, 7, 8, 9, or 10 nucleotides longer than the first sequence. In some embodiments, the first sequence and the second sequence are the same number of nucleotides in length.

[0119] In some embodiments, each of the sense and antisense strands may range from 9-36 nucleotides in length. For example, each strand may be between 12-30 nucleotides in length, 14-30 nucleotides in length, 15-30 nucleotides in length, 25-30 nucleotides in length, 27-30 nucleotides in length, 15-26 nucleotides in length, 15-23 nucleotides in length, 15-22 nucleotides in length, 15-21 nucleotides in length, 15-20 nucleotides in length, 15-19 nucleotides in length, 15-18 nucleotides in length, 15-17 nucleotides in length, 17-30 nucleotides in length, 17-23 nucleotides in length, 17-21 nucleotides in length, 17-19 nucleotides in length, 18-30 nucleotides in length, 18-26 nucleotides in length, 18-25 nucleotides in length, 18-23 nucleotides in length, 18-22 nucleotides in length, 18-21 nucleotides in length, 18-20 nucleotides in length, 19-30 nucleotides in length, 19-25 nucleotides in length, 19-24 nucleotides in length, 19-23 nucleotides in length, 19-22 nucleotides in length, 19-21 nucleotides in length, 19-20 nucleotides in length, 20-30 nucleotides in length, 20-26 nucleotides in length, 20-25 nucleotides in length, 20-24 nucleotides in length, 20-23 nucleotides in length, 20-22 nucleotides in length, 20-21 nucleotides in length, 21-30 nucleotides in length, 21-26 nucleotides in length, 21-25 nucleotides in length, 21-24 nucleotides in length, 21-23 nucleotides in length, or 21-22 nucleotides in length. In some embodiments, each strand is greater than or equal to 9, 10, 11, 12, 13, 14, 15, 16, 17, 18, 19, 20, 21, 22, 23, 24, 25, 26, 27, 28, 29, 30, 31, 32, 33, 34, or 35 nucleotides in length. In some embodiments, each strand is less than or equal to 10, 11, 12, 13, 14, 15, 16, 17, 18, 19, 20, 21, 22, 23, 24, 25, 26, 27, 28, 29, 30, 31, 32, 33, 34, 35, or 36 nucleotides in length. That is, each strand can be any of a range of nucleotide lengths having an upper limit of 10, 11, 12, 13, 14, 15, 16, 17, 18, 19, 20, 21, 22, 23, 24, 25, 26, 27, 28, 29, 30, 31, 32, 33, 34, 35, or 36, and an independently selected lower limit of 9, 10, 11, 12, 13, 14, 15, 16, 17, 18, 19, 20, 21, 22, 23, 24, 25, 26, 27, 28, 29, 30, 31, 32, 33, 34, or 35, wherein the lower limit is less than the upper limit. In some embodiments, each strand is 9, 10, 11, 12, 13, 14, 15, 16, 17, 18, 19, 20, 21, 22, 23, 24, 25, 26, 27, 28, 29, 30, 31, 32, 33, 34, 35, or 36 nucleotides in length. In some embodiments, the sense strand and antisense strand are the same number of nucleotides in length. In some embodiments, the sense strand and antisense strand are a different number of nucleotides in length.

[0120] In some embodiments, the first sequence (in the sense strand) and the second sequence (in the antisense strand) comprise less than 30% GC. By “less than 30% GC” is meant that, compared to the total nucleotide content of the first and/or second sequence, less than 30% of the nucleotides of said sequences are G (guanine) or C (cytosine). G (guanine) and C (cytosine) nucleotide contents also include modified G and C nucleotides. Such modifications are described below and include, for example, 2′-O-methylguanosine (mG), 2′-O-methylcytidine (mC), 2′-fluoro-guanosine (fG), 2′-fluoro-cytidine (fC), or locked guanine and cytosine (lG and lC). Without wanting to be bound by any theory, the inventors have noted that dsRNA of the present disclosure, comprising less than 30% of GC content exhibit higher efficacy in knocking down the expression of human PCSK9.

[0121] Overhangs

[0122] In some embodiments, a dsRNA of the present disclosure comprises one or more overhangs at the 3′-end, 5′-end, or both ends of one or both of the sense and antisense strands. In some embodiments, the one or more overhangs improve the stability and/or inhibitory activity of the dsRNA.

[0123] In some embodiments, the overhang comprises one or more, two or more, three or more, four or more, five or more, or six or more nucleotides. For example, the overhang may comprise 1-6 nucleotides, 2-6 nucleotides, 3-6 nucleotides, 4-6 nucleotides, 5-6 nucleotides, 1-5 nucleotides, 2-5 nucleotides, 3-5 nucleotides, 4-5 nucleotides, 1-4 nucleotides, 2-4 nucleotides, 3-4 nucleotides, 1-3 nucleotides, 2-3 nucleotides, or 1-2 nucleotides. In some embodiments, the overhang is one, two, three, four, five, or six nucleotides in length.

[0124] In some embodiments, an overhang of the present disclosure comprises one or more ribonucleotides. In some embodiments, an overhang of the present disclosure comprises one or more deoxyribonucleotides. In some embodiments, the overhang comprises one or more thymines.

[0125] In some embodiments, the dsRNA comprises an overhang located at the 3′-end of the antisense strand. In some embodiments, the dsRNA comprises a blunt end at the 5′-end of the antisense strand. In some embodiments, the dsRNA comprises an overhang located at the 3′-end of the antisense strand and a blunt end at the 5′-end of the antisense strand. In some embodiments, the dsRNA comprises an overhang located at the 3′-end of the sense strand. In some embodiments, the dsRNA comprises a blunt end at the 5′-end of the sense strand. In some embodiments, the dsRNA comprises an overhang located at the 3′-end of the sense strand and a blunt end at the 5′-end of the sense strand. In some embodiments, the dsRNA comprises overhangs located at both the 3′-end of the sense and antisense strands of the dsRNA.

[0126] In some embodiments, the dsRNA comprises an overhang located at the 5′-end of the antisense strand. In some embodiments, the dsRNA comprises a blunt end at the 3′-end of the antisense strand. In some embodiments, the dsRNA comprises an overhang located at the 5′-end of the antisense strand and a blunt end at the 3′-end of the antisense strand. In some embodiments, the dsRNA comprises an overhang located at the 5′-end of the sense strand. In some embodiments, the dsRNA comprises a blunt end at the 3′-end of the sense strand. In some embodiments, the dsRNA comprises an overhang located at the 5′-end of the sense strand and a blunt end at the 3′-end of the sense strand. In some embodiments, the dsRNA comprises overhangs located at both the 5′-end of the sense and antisense strands of the dsRNA.

[0127] In some embodiments, the overhang is the result of the sense strand being longer than the antisense strand. In some embodiments, the overhang is the result of the antisense strand being longer than the sense strand. In some embodiments, the overhang is the result of sense and antisense strands of the same length being staggered. In some embodiments, the overhang forms a mismatch with the target mRNA. In some embodiments, the overhang is complementary to the target mRNA.

[0128] In some embodiments, a dsRNA of the present disclosure comprises a sense strand comprising a first sequence and an antisense strand comprising a second sequence, wherein the first and second sequences are substantially complementary or complementary. In some embodiments, the first and second sequences are substantially complementary or complementary and form a duplex region of a dsRNA. In some embodiments, the duplex region of the dsRNA is 9-36 nucleotide pairs in length. For example, the duplex region may be between 12-30 nucleotide pairs in length, 14-30 nucleotide pairs in length, 15-30 nucleotide pairs in length, 15-26 nucleotide pairs in length, 15-23 nucleotide pairs in length, 15-22 nucleotide pairs in length, 15-21 nucleotide pairs in length, 15-20 nucleotide pairs in length, 15-19 nucleotide pairs in length, 15-18 nucleotide pairs in length, 15-17 nucleotide pairs in length, 17-30 nucleotide pairs in length, 27-30 nucleotide pairs in length, 17-23 nucleotide pairs in length, 17-21 nucleotide pairs in length, 17-19 nucleotide pairs in length, 18-30 nucleotide pairs in length, 18-26 nucleotide pairs in length, 18-25 nucleotide pairs in length, 18-24 nucleotide pairs in length, 18-23 nucleotide pairs in length, 18-22 nucleotide pairs in length, 18-21 nucleotide pairs in length, 18-20 nucleotide pairs in length, 19-30 nucleotide pairs in length, 19-25 nucleotide pairs in length, 19-24 nucleotide pairs in length, 19-23 nucleotide pairs in length, 19-22 nucleotide pairs in length, 19-21 nucleotide pairs in length, 19-20 nucleotide pairs in length, 20-30 nucleotide pairs in length, 20-26 nucleotide pairs in length, 20-25 nucleotide pairs in length, 20-24 nucleotide pairs in length, 20-23 nucleotide pairs in length, 20-22 nucleotide pairs in length, 20-21 nucleotide pairs in length, 21-30 nucleotide pairs in length, 21-26 nucleotide pairs in length, 21-25 nucleotide pairs in length, 21-24 nucleotide pairs in length, 21-23 nucleotide pairs in length, or 21-22 nucleotide pairs in length. In some embodiments, the duplex region of the dsRNA is greater than or equal to 9, 10, 11, 12, 13, 14, 15, 16, 17, 18, 19, 20, 21, 22, 23, 24, 25, 26, 27, 28, 29, 30, 31, 32, 33, 34, or 35 nucleotide pairs in length. In some embodiments, the duplex region of the dsRNA is less than or equal to 10, 11, 12, 13, 14, 15, 16, 17, 18, 19, 20, 21, 22, 23, 24, 25, 26, 27, 28, 29, 30, 31, 32, 33, 34, 35, or 36 nucleotide pairs in length. That is, the duplex region of the dsRNA can be any of a range of nucleotide pairs in length having an upper limit of 10, 11, 12, 13, 14, 15, 16, 17, 18, 19, 20, 21, 22, 23, 24, 25, 26, 27, 28, 29, 30, 31, 32, 33, 34, 35, or 36, and an independently selected lower limit of 9, 10, 11, 12, 13, 14, 15, 16, 17, 18, 19, 20, 21, 22, 23, 24, 25, 26, 27, 28, 29, 30, 31, 32, 33, 34, or 35, wherein the lower limit is less than the upper limit. In some embodiments, the duplex region is 9, 10, 11, 12, 13, 14, 15, 16, 17, 18, 19, 20, 21, 22, 23, 24, 25, 26, 27, 28, 29, 30, 31, 32, 33, 34, 35, or 36 nucleotide pairs in length. If more than one dsRNA is used, the duplex region of each dsRNA may be the same or different lengths than the one or more additional dsRNAs.

[0129] Target Sequences and First and Second Sequences in dsRNAs

[0130] In some embodiments, the target sequence is derived from a PCSK9 gene (such as a human PCSK9 gene). The human PCSK9 gene and associated mRNA sequences are known in the art. In some embodiments, the targeted mRNA has the sequence set forth in NCBI Ref. Seq. NM_174936.3. In some embodiments, a human PCSK9 cDNA has the sequence

(SEQ ID NO: 1)
GTCCGATGGGGCTCTGGTGGCGTGATCTGCGCGCCCCAGGCGTCAAGCACC
CACACCCTAGAAGGTTTCCGCAGCGACGTCGAGGCGCTCATGGTTGCAGGC
GGGCGCCGCCGTTCAGTTCAGGGTCTGAGCCTGGAGGAGTGAGCCAGGCAG
TGAGACTGGCTCGGGCGGGCCGGGACGCGTCGTTGCAGCAGCGGCTCCCAG
CTCCCAGCCAGGATTCCGCGCGCCCCTTCACGCGCCCTGCTCCTGAACTTC
AGCTCCTGCACAGTCCTCCCCACCGCAAGGCTCAAGGCGCCGCCGGCGTGG
ACCGCGCACGGCCTCTAGGTCTCCTCGCCAGGACAGCAACCTCTCCCCTGG
CCCTCATGGGCACCGTCAGCTCCAGGCGGTCCTGGTGGCCGCTGCCACTGC
TGCTGCTGCTGCTGCTGCTCCTGGGTCCCGCGGGCGCCCGTGCGCAGGAGG
ACGAGGACGGCGACTACGAGGAGCTGGTGCTAGCCTTGCGTTCCGAGGAGG
ACGGCCTGGCCGAAGCACCCGAGCACGGAACCACAGCCACCTTCCACCGCT
GCGCCAAGGATCCGTGGAGGTTGCCTGGCACCTACGTGGTGGTGCTGAAGG
AGGAGACCCACCTCTCGCAGTCAGAGCGCACTGCCCGCCGCCTGCAGGCCC
AGGCTGCCCGCCGGGGATACCTCACCAAGATCCTGCATGTCTTCCATGGCC
TTCTTCCTGGCTTCCTGGTGAAGATGAGTGGCGACCTGCTGGAGCTGGCCT
TGAAGTTGCCCCATGTCGACTACATCGAGGAGGACTCCTCTGTCTTTGCCC
AGAGCATCCCGTGGAACCTGGAGCGGATTACCCCTCCACGGTACCGGGCGG
ATGAATACCAGCCCCCCGACGGAGGCAGCCTGGTGGAGGTGTATCTCCTAG
ACACCAGCATACAGAGTGACCACCGGGAAATCGAGGGCAGGGTCATGGTCA
CCGACTTCGAGAATGTGCCCGAGGAGGACGGGACCCGCTTCCACAGACAGG
CCAGCAAGTGTGACAGTCATGGCACCCACCTGGCAGGGGTGGTCAGCGGCC
GGGATGCCGGCGTGGCCAAGGGTGCCAGCATGCGCAGCCTGCGCGTGCTCA
ACTGCCAAGGGAAGGGCACGGTTAGCGGCACCCTCATAGGCCTGGAGTTTA
TTCGGAAAAGCCAGCTGGTCCAGCCTGTGGGGCCACTGGTGGTGCTGCTGC
CCCTGGCGGGTGGGTACAGCCGCGTCCTCAACGCCGCCTGCCAGCGCCTGG
CGAGGGCTGGGGTCGTGCTGGTCACCGCTGCCGGCAACTTCCGGGACGATG
CCTGCCTCTACTCCCCAGCCTCAGCTCCCGAGGTCATCACAGTTGGGGCCA
CCAATGCCCAAGACCAGCCGGTGACCCTGGGGACTTTGGGGACCAACTTTG
GCCGCTGTGTGGACCTCTTTGCCCCAGGGGAGGACATCATTGGTGCCTCCA
GCGACTGCAGCACCTGCTTTGTGTCACAGAGTGGGACATCACAGGCTGCTG
CCCACGTGGCTGGCATTGCAGCCATGATGCTGTCTGCCGAGCCGGAGCTCA
CCCTGGCCGAGTTGAGGCAGAGACTGATCCACTTCTCTGCCAAAGATGTCA
TCAATGAGGCCTGGTTCCCTGAGGACCAGCGGGTACTGACCCCCAACCTGG
TGGCCGCCCTGCCCCCCAGCACCCATGGGGCAGGTTGGCAGCTGTTTTGCA
GGACTGTATGGTCAGCACACTCGGGGCCTACACGGATGGCCACAGCCGTCG
CCCGCTGCGCCCCAGATGAGGAGCTGCTGAGCTGCTCCAGTTTCTCCAGGA
GTGGGAAGCGGCGGGGCGAGCGCATGGAGGCCCAAGGGGGCAAGCTGGTCT
GCCGGGCCCACAACGCTTTTGGGGGTGAGGGTGTCTACGCCATTGCCAGGT
GCTGCCTGCTACCCCAGGCCAACTGCAGCGTCCACACAGCTCCACCAGCTG
AGGCCAGCATGGGGACCCGTGTCCACTGCCACCAACAGGGCCACGTCCTCA
CAGGCTGCAGCTCCCACTGGGAGGTGGAGGACCTTGGCACCCACAAGCCGC
CTGTGCTGAGGCCACGAGGTCAGCCCAACCAGTGCGTGGGCCACAGGGAGG
CCAGCATCCACGCTTCCTGCTGCCATGCCCCAGGTCTGGAATGCAAAGTCA
AGGAGCATGGAATCCCGGCCCCTCAGGAGCAGGTGACCGTGGCCTGCGAGG
AGGGCTGGACCCTGACTGGCTGCAGTGCCCTCCCTGGGACCTCCCACGTCC
TGGGGGCCTACGCCGTAGACAACACGTGTGTAGTCAGGAGCCGGGACGTCA
GCACTACAGGCAGCACCAGCGAAGGGGCCGTGACAGCCGTTGCCATCTGCT
GCCGGAGCCGGCACCTGGCGCAGGCCTCCCAGGAGCTCCAGTGACAGCCCC
ATCCCAGGATGGGTGTCTGGGGAGGGTCAAGGGCTGGGGCTGAGCTTTAAA
ATGGTTCCGACTTGTCCCTCTCTCAGCCCTCCATGGCCTGGCACGAGGGGA
TGGGGATGCTTCCGCCTTTCCGGGGCTGCTGGCCTGGCCCTTGAGTGGGGC
AGCCTCCTTGCCTGGAACTCACTCACTCTGGGTGCCTCCTCCCCAGGTGGA
GGTGCCAGGAAGCTCCCTCCCTCACTGTGGGGCATTTCACCATTCAAACAG
GTCGAGCTGTGCTCGGGTGCTGCCAGCTGCTCCCAATGTGCCGATGTCCGT
GGGCAGAATGACTTTTATTGAGCTCTTGTTCCGTGCCAGGCATTCAATCCT
CAGGTCTCCACCAAGGAGGCAGGATTCTTCCCATGGATAGGGGAGGGGGCG
GTAGGGGCTGCAGGGACAAACATCGTTGGGGGGTGAGTGTGAAAGGTGCTG
ATGGCCCTCATCTCCAGCTAACTGTGGAGAAGCCCCTGGGGGCTCCCTGAT
TAATGGAGGCTTAGCTTTCTGGATGGCATCTAGCCAGAGGCTGGAGACAGG
TGCGCCCCTGGTGGTCACAGGCTGTGCCTTGGTTTCCTGAGCCACCTTTAC
TCTGCTCTATGCCAGGCTGTGCTAGCAACACCCAAAGGTGGCCTGCGGGGA
GCCATCACCTAGGACTGACTCGGCAGTGTGCAGTGGTGCATGCACTGTCTC
AGCCAACCCGCTCCACTACCCGGCAGGGTACACATTCGCACCCCTACTTCA
CAGAGGAAGAAACCTGGAACCAGAGGGGGCGTGCCTGCCAAGCTCACACAG
CAGGAACTGAGCCAGAAACGCAGATTGGGCTGGCTCTGAAGCCAAGCCTCT
TCTTACTTCACCCGGCTGGGCTCCTCATTTTTACGGGTAACAGTGAGGCTG
GGAAGGGGAACACAGACCAGGAAGCTCGGTGAGTGATGGCAGAACGATGCC
TGCAGGCATGGAACTTTTTCCGTTATCACCCAGGCCTGATTCACTGGCCTG
GCGGAGATGCTTCTAAGGCATGGTCGGGGGAGAGGGCCAACAACTGTCCCT
CCTTGAGCACCAGCCCCACCCAAGCAAGCAGACATTTATCTTTTGGGTCTG
TCCTCTCTGTTGCCTTTTTACAGCCAACTTTTCTAGACCTGTTTTGCTTTT
GTAACTTGAAGATATTTATTCTGGGTTTTGTAGCATTTTTATTAATATGGT
GACTTTTTAAAATAAAAACAAACAAACGTTGTCCTAACAAAAAAAAAAAAA
AAAAAAAA.

[0131] In some embodiments, the dsRNA antisense strand comprises a sequence that is substantially complementary or complementary to between 12 and 30 nucleotides of a target sequence. For example, the sequence in the antisense strand may be substantially complementary or complementary to between 12-30 nucleotides, 14-30 nucleotides, 15-30 nucleotides, 15-26 nucleotides, 15-23 nucleotides, 15-22 nucleotides, 15-21 nucleotides, 15-20 nucleotides, 15-19 nucleotides, 15-18 nucleotides, 15-17 nucleotides, 17-30 nucleotides, 27-30 nucleotides, 17-23 nucleotides, 17-21 nucleotides, 17-19 nucleotides, 18-30 nucleotides, 18-26 nucleotides, 18-25 nucleotides, 18-23 nucleotides, 18-22 nucleotides, 18-21 nucleotides, 18-20 nucleotides, 19-30 nucleotides, 19-25 nucleotides, 19-24 nucleotides, 19-23 nucleotides, 19-22 nucleotides, 19-21 nucleotides, 19-20 nucleotides, 20-30 nucleotides, 20-26 nucleotides, 20-25 nucleotides, 20-24 nucleotides, 20-23 nucleotides, 20-22 nucleotides, 20-21 nucleotides, 21-30 nucleotides, 21-26 nucleotides, 21-25 nucleotides, 21-24 nucleotides, 21-23 nucleotides, or 21-22 nucleotides of a target sequence. In some embodiments, the sequence in the antisense strand may be substantially complementary or complementary to greater than or equal to 12, 13, 14, 15, 16, 17, 18, 19, 20, 21, 22, 23, 24, 25, 26, 27, 28, or 29 nucleotides of a target sequence. In some embodiments, the sequence in the antisense strand may be substantially complementary or complementary to less than or equal to 13, 14, 15, 16, 17, 18, 19, 20, 21, 22, 23, 24, 25, 26, 27, 28, 29, or 30 nucleotides of a target sequence. That is, the sequence in the antisense strand may be substantially complementary or complementary to any of a range of nucleotides of a target sequence having an upper limit of 13, 14, 15, 16, 17, 18, 19, 20, 21, 22, 23, 24, 25, 26, 27, 28, 29, or 30, and an independently selected lower limit of 12, 13, 14, 15, 16, 17, 18, 19, 20, 21, 22, 23, 24, 25, 26, 27, 28, or 29, wherein the lower limit is less than the upper limit. In some embodiments, the sequence in the antisense strand may be substantially complementary or complementary to 12, 13, 14, 15, 16, 17, 18, 19, 20, 21, 22, 23, 24, 25, 26, 27, 28, 29, or 30 nucleotides. If more than one dsRNA is used, the region of complementarity of each dsRNA may be the same or different lengths than the one or more additional dsRNAs.

[0132] In some embodiments, the target sequence comprises UUGUAGCAUUUUUAUUAAUAUGGUGACUUUUUAAAAUAAAAACAAACA (SEQ ID NO:2). In some embodiments, the target sequence comprises GAGUGUGAAAGGUGCUGAUGGCCCUCAUCU (SEQ ID NO:12). In some embodiments, the target sequence (e.g., a first sequence of a sense strand of a dsRNA of the present disclosure) is a sequence described in Table IA.

TABLE lA
siRNA sequence information.

| | | Target start position in |
|---|---|---|
| | | human PCSK9 mRNA |
| siRNA | Target sequence (5′→3′) | (NM_174936.3) |
| B001 | UUGUAGCAUUUUUAUUAAU (SEQ ID NO: 3) | 3649 |
| B003 | GUAGCAUUUUUAUUAAUAU (SEQ ID NO: 4) | 3651 |
| B006 | GCAUUUUUAUUAAUAUGGU (SEQ ID NO: 5) | 3654 |
| B008 | UUUUAUUAAUAUGGUGACU (SEQ ID NO: 6) | 3658 |
| B010 | UAUUAAUAUGGUGACUUUU (SEQ ID NO: 7) | 3661 |
| B011 | AUUAAUAUGGUGACUUUUU (SEQ ID NO: 8) | 3662 |
| B012 | UUAAUAUGGUGACUUUUUA (SEQ ID NO: 9) | 3663 |
| B013 | UAAUAUGGUGACUUUUUAA (SEQ ID NO: 10) | 3664 |
| B014 | UAUGGUGACUUUUUAAAAU (SEQ ID NO: 11) | 3667 |
| C051 | GAGUGUGAAAGGUGCUGAU (SEQ ID NO: 13) | 2891 |
| C209.016 | UUAUUAAUAUGGUGACUUU (SEQ ID NO: 310) | 3660 |
| C217.013 | AUAUGGUGACUUUUUAAAA (SEQ ID NO: 311) | 3656 |
| C218.003 | AUUUUUAUUAAUAUGGUGACU (SEQ ID NO: 312) | 3656 |
| C218.005 | UUUUAUUAAUAUGGUGACUUU (SEQ ID NO: 313) | 3658 |
| C218.006 | UUUAUUAAUAUGGUGACUUUU (SEQ ID NO: 314) | 3659 |
| C218.008 | UAUUAAUAUGGUGACUUUUUA (SEQ ID NO: 315) | 3661 |
| C218.012 | AAUAUGGUGACUUUUUAAAAU (SEQ ID NO: 316) | 3665 |
| C219.001 | GCAUUUUUAUUAAUAUGGUGACU (SEQ ID NO: 317) | 3654 |
| C219.003 | AUUUUUAUUAAUAUGGUGACUUU (SEQ ID NO: 318) | 3656 |
| C219.004 | UUUUUAUUAAUAUGGUGACUUUU (SEQ ID NO: 319) | 3657 |
| C219.006 | UUUAUUAAUAUGGUGACUUUUUA (SEQ ID NO: 320) | 3659 |
| C219.007 | UUAUUAAUAUGGUGACUUUUUAA (SEQ ID NO: 321) | 3660 |

[0133] In some embodiments, a dsRNA of the present disclosure comprises a sense strand comprising a first sequence. In some embodiments, the first sequence comprises a target sequence shown in Table IA. In some embodiments, the first sequence is a target sequence shown in Table IA. In some embodiments, the first sequence comprises a sequence selected from SEQ ID NOS: 3-11, 13, and 310-321. In some embodiments, the first sequence comprises a sequence selected from SEQ ID NOS: 6-11, and 310-321. In some embodiments, the first sequence is a sequence selected from SEQ ID NOS: 3-11, 13, and 310-321. In some embodiments, the first sequence is a sequence selected from SEQ ID NOS: 3, 4, and 13. In some embodiments, the first sequence is not one of GCAUUUUUAUUAAUAUGGU (SEQ ID NO: 5), UUUGUAGCAUUUUUAUUAAUAUGGU (SEQ ID NO: 576), or AUUUUUAUUAAUAUGGUGA (SEQ ID NO: 577).

[0134] In some embodiments, a dsRNA of the present disclosure comprises a first sequence comprising a sequence selected from the group consisting of SEQ ID NOS: 6-11 and 310-321, wherein the sequence selected from the group consisting of SEQ ID NOS: 6-11 and 310-321 comprises less than 30% GC. In some embodiments, a dsRNA of the present disclosure comprises a first sequence comprising a sequence selected from the group consisting of SEQ ID NOS: 6-11 and 310-321, wherein the first sequence comprises less than 30% GC. In some embodiments, a dsRNA of the present disclosure comprises a first sequence that is one of SEQ ID NOS: 3, 4, and 13, wherein the first sequence comprises less than 30% GC.

[0135] In some embodiments, a dsRNA of the present disclosure comprises an antisense strand comprising a second sequence. In some embodiments, the second sequence is substantially complementary or fully complementary to the first sequence (i.e., in the sense strand). In some embodiments, the second sequence is substantially complementary to the first sequence (i.e., in the sense strand), and the second strand comprises at least one mismatch (e.g., one mismatch, two mismatches, three mismatches, or four mismatches) to the first strand. In some embodiments, the second sequence is substantially complementary to the first sequence (i.e., in the sense strand), and the second strand comprises one or two mismatches to the first strand. In some embodiments, the second sequence is substantially complementary to a sequence selected from SEQ ID NOS: 3-11, 13, and 310-321, wherein the second strand comprises at least one mismatch (e.g., one mismatch, two mismatches, three mismatches, or four mismatches) to a sequence selected from SEQ ID NOS: 3-11, 13, and 310-321. In some embodiments, the second sequence is substantially complementary to a sequence selected from SEQ ID NOS: 3-11, 13, and 310-321, wherein the second strand comprises one or two mismatches to a sequence selected from SEQ ID NOS: 3-11, 13, and 310-321. In some embodiments, the second sequence is fully complementary to the first sequence (i.e., in the sense strand). In some embodiments, the second sequence is fully complementary to a sequence selected from SEQ ID NOS: 3-11, 13, and 310-321.

[0136] In some embodiments, a dsRNA of the present disclosure comprises a second sequence that is substantially complementary to a sequence selected from the group consisting of SEQ ID NOS: 3-11 and 310-321, wherein the second sequence comprises less than 30% GC. In some embodiments, a dsRNA of the present disclosure comprises a second sequence that is fully complementary to a sequence selected from the group consisting of SEQ ID NOS: 3-11 and 310-321, wherein the second sequence comprises less than 30% GC.

[0137] In some embodiments, the second sequence is substantially complementary or fully complementary to a sequence within SEQ ID NO:2 or SEQ ID NO:12. In some embodiments, the second sequence is substantially complementary or fully complementary to at least 15 contiguous nucleotides of SEQ ID NO:2 or SEQ ID NO:12. In some embodiments, the second sequence is substantially complementary or fully complementary to at least 19 contiguous nucleotides of SEQ ID NO:2 or SEQ ID NO:12. In some embodiments, the second sequence is substantially complementary or fully complementary to less than or equal to 30 contiguous nucleotides of SEQ ID NO:2 or SEQ ID NO:12. In some embodiments, the second sequence is substantially complementary or fully complementary to at least 19 and less than or equal to 23 contiguous nucleotides of SEQ ID NO:2 or SEQ ID NO:12. In some embodiments, the second sequence comprises a sequence shown in Table 1B. In some embodiments, the second sequence is a sequence shown in Table 1B.

TABLE 1B
siRNA second sequence information.

| siRNA | Second sequence (5′→3′) |
|---|---|
| B001 | AUUAAUAAAAAUGCUACAA (SEQ ID NO: 370) |
| B003 | AUAUUAAUAAAAAUGCUAC (SEQ ID NO: 371) |
| B006 | ACCAUAUUAAUAAAAAUGC (SEQ ID NO: 372) |
| B008 | AGUCACCAUAUUAAUAAAA (SEQ ID NO: 373) |
| B010 | AAAAGUCACCAUAUUAAUA (SEQ ID NO: 374) |
| B011 | AAAAAGUCACCAUAUUAAU (SEQ ID NO: 375) |
| B012 | UAAAAAGUCACCAUAUUAA (SEQ ID NO: 376) |
| B013 | UUAAAAAGUCACCAUAUUA (SEQ ID NO: 377) |
| B014 | AUUUUAAAAAGUCACCAUA (SEQ ID NO: 378) |
| C051 | AUCAGCACCUUUCACACUC (SEQ ID NO: 379) |
| C209.016 | AAAGUCACCAUAUUAAUAA (SEQ ID NO: 380) |
| C217.013 | UUUUAAAAAGUCACCAUAU (SEQ ID NO: 381) |
| C218.003 | AGUCACCAUAUUAAUAAAAAU (SEQ ID NO: 382) |
| C218.005 | AAAGUCACCAUAUUAAUAAAA (SEQ ID NO: 383) |
| C218.006 | AAAAGUCACCAUAUUAAUAAA (SEQ ID NO: 384) |
| C218.008 | UAAAAAGUCACCAUAUUAAUA (SEQ ID NO: 385) |
| C218.012 | AUUUUAAAAAGUCACCAUAUU (SEQ ID NO: 386) |
| C219.001 | AGUCACCAUAUUAAUAAAAAUGC (SEQ ID NO: 387) |
| C219.003 | AAAGUCACCAUAUUAAUAAAAAU (SEQ ID NO: 388) |
| C219.004 | AAAAGUCACCAUAUUAAUAAAAA (SEQ ID NO: 389) |
| C219.006 | UAAAAAGUCACCAUAUUAAUAAA (SEQ ID NO: 390) |
| C219.007 | UUAAAAAGUCACCAUAUUAAUAA (SEQ ID NO: 391) |

[0138] In some embodiments, a dsRNA or the second sequence in the antisense strand of a dsRNA of the present disclosure comprises one or more mismatches to the target sequence. In some embodiments, the target sequence is SEQ ID NO:2 or SEQ ID NO:12. In some embodiments, the dsRNA or the second sequence in the antisense strand of the dsRNA comprises no more than 4, 3, or 2 mismatches to the target sequence. In some embodiments, the dsRNA or the second sequence in the antisense strand of the dsRNA comprises no more than 1 mismatch to the target sequence. In some embodiments, the one or more mismatches is/are not located in the center of the region of complementarity. In some embodiments, the one or more mismatches is located within five, within four, within three, within two or within one nucleotide of the 5′ and/or 3′ ends of the region of complementarity. For example, for a 23 nucleotides dsRNA strand which is complementary to a region of the PCSK9 gene, the dsRNA generally does not contain any mismatch within the central 13 nucleotides of the region of complementarity between the dsRNA strand and the PCSK9 mRNA.

[0139] In some embodiments, a dsRNA of the present disclosure comprises a sense strand and/or an antisense strand described in Table 2 or Table 3. While the exemplary siRNAs shown in Table 2 include modifications, siRNAs having the same sequence but a different number/pattern/type of modifications, are also contemplated. siRNAs having the same sequences with no 2′-O-Me and 2′-Fluoro modifications are shown in Table 3. In some embodiments, a dsRNA comprises a sense strand shown in Table 3 but lacking the 5′ CCA and/or 3′ invdT. In some embodiments, a dsRNA comprises an antisense strand shown in Table 3 but lacking the 3′ dTdT.

TABLE 2
siRNA sequences (with modifications).

| | Sequence sense strand 5′-->3′ | Sequence antisense strand 5′-->3′ |
|---|---|---|
| siRNA ID | (SEQ ID NO) | (SEQ ID NO) |
| B001 | mCmCmAfUmUfGmUfAmGfCmAfUmU | fAfUmUfAmAfUmAfAmAfAmAfUm |
| | fUmUfUmAfUmUfAmAfUinvdT | GfCmUfAmCfAmAdTdT |
| | (SEQ ID NO: 14) | (SEQ ID NO: 15) |
| B002 | mCmCmAfUmGfUmAfGmCfAmUfUmU | fUfAmUfUmAfAmUfAmAfAmAfAm |
| | fUmUfAmUfUmAfAmUfAinvdT | UfGmCfUmAfCmAdTdT |
| | (SEQ ID NO: 16) | (SEQ ID NO: 17) |
| B003 | mCmCmAfGmUfAmGfCmAfUmUfUmU | fAfUmAfUmUfAmAfUmAfAmAfAm |
| | fUmAfUmUfAmAfUmAfUinvdT | AfUmGfCmUfAmCdTdT |
| | (SEQ ID NO: 18) | (SEQ ID NO: 19) |
| B004 | mCmCmAfUmAfGmCfAmUfUmUfUmU | fCfAmUfAmUfUmAfAmUfAmAfAm |
| | fAmUfUmAfAmUfAmUfGinvdT | AfAmUfGmCfUmAdTdT |
| | (SEQ ID NO: 20) | (SEQ ID NO: 21) |
| B005 | mCmCmAfAmGfCmAfUmUfUmUfUmA | fCfCmAfUmAfUmUfAmAfUmAfAm |
| | fUmUfAmAfUmAfUmGfGinvdT | AfAmAfUmGfCmUdTdT |
| | (SEQ ID NO: 22) | (SEQ ID NO: 23) |
| B006 | mCmCmAfGmCfAmUfUmUfUmUfAmU | fAfCmCfAmUfAmUfUmAfAmUfAm |
| | fUmAfAmUfAmUfGmGfUinvdT | AfAmAfAmUfGmCdTdT |
| | (SEQ ID NO: 24) | (SEQ ID NO: 25) |
| B007 | mCmCmAfUmUfUmUfUmAfUmUfAmA | fGfUmCfAmCfCmAfUmAfUmUfAm |
| | fUmAfUmGfGmUfGmAfCinvdT | AfUmAfAmAfAmAdTdT |
| | (SEQ ID NO: 26) | (SEQ ID NO: 27) |
| B008 | mCmCmAfUmUfUmUfAmUfUmAfAmU | fAfGmUfCmAfCmCfAmUfAmUfUm |
| | fAmUfGmGfUmGfAmCfUinvdT | AfAmUfAmAfAmAdTdT |
| | (SEQ ID NO: 28) | (SEQ ID NO: 29) |
| B009 | mCmCmAfUmUfUmAfUmUfAmAfUmA | fAfAmGfUmCfAmCfCmAfUmAfUm |
| | fUmGfGmUfGmAfCmUfUinvdT | UfAmAfUmAfAmAdTdT |
| | (SEQ ID NO: 30) | (SEQ ID NO: 31) |
| B010 | mCmCmAfUmAfUmUfAmAfUmAfUmG | fAfAmAfAmGfUmCfAmCfCmAfUm |
| | fGmUfGmAfCmUfUmUfUinvdT | AfUmUfAmAfUmAdTdT |
| | (SEQ ID NO: 32) | (SEQ ID NO: 33) |
| B011 | mCmCmAfAmUfUmAfAmUfAmUfGmG | fAfAmAfAmAfGmUfCmAfCmCfAm |
| | fUmGfAmCfUmUfUmUfUinvdT | UfAmUfUmAfAmUdTdT |
| | (SEQ ID NO: 34) | (SEQ ID NO: 35) |
| B012 | mCmCmAfUmUfAmAfUmAfUmGfGmU | fUfAmAfAmAfAmGfUmCfAmCfCm |
| | fGmAfCmUfUmUfUmUfAinvdT | AfUmAfUmUfAmAdTdT |
| | (SEQ ID NO: 36) | (SEQ ID NO: 37) |
| B013 | mCmCmAfUmAfAmUfAmUfGmGfUmG | fUfUmAfAmAfAmAfGmUfCmAfCm |
| | fAmCfUmUfUmUfUmAfAinvdT | CfAmUfAmUfUmAdTdT |
| | (SEQ ID NO: 38) | (SEQ ID NO: 39) |
| B014 | mCmCmAfUmAfUmGfGmUfGmAfCmU | fAfUmUfUmUfAmAfAmAfAmGfUm |
| | fUmUfUmUfAmAfAmAfUinvdT | CfAmCfCmAfUmAdTdT |
| | (SEQ ID NO: 40) | (SEQ ID NO: 41) |
| C001 | mCmCmAfGmGfCmUfCmUfGmGfUmGf | fAfGmAfUmCfAmCfGmCfCmAfCmC |
| | GmCfGmUfGmAfUmCfUinvdT | fAmGfAmGfCmCdTdT |
| | (SEQ ID NO: 42) | (SEQ ID NO: 43) |
| C002 | mCmCmAfGmCfUmCfUmGfGmUfGmGf | fCfAmGfAmUfCmAfCmGfCmCfAmC |
| | CmGfUmGfAmUfCmUfGinvdT | fCmAfGmAfGmCdTdT |
| | (SEQ ID NO: 44) | (SEQ ID NO: 45) |
| C003 | mCmCmAfCmUfCmUfGmGfUmGfGmCf | fGfCmAfGmAfUmCfAmCfGmCfCmA |
| | GmUfGmAfUmCfUmGfCinvdT | fCmCfAmGfAmGdTdT |
| | (SEQ ID NO: 46) | (SEQ ID NO: 47) |
| C004 | mCmCmAfUmCfUmGfGmUfGmGfCmGf | fCfGmCfAmGfAmUfCmAfCmGfCmC |
| | UmGfAmUfCmUfGmCfGinvdT | fAmCfCmAfGmAdTdT |
| | (SEQ ID NO: 48) | (SEQ ID NO: 49) |
| C005 | mCmCmAfCmAfGmGfCmGfUmCfAmAf | fUfGmUfGmGfGmUfGmCfUmUfGm |
| | GmCfAmCfCmCfAmCfAinvdT | AfCmGfCmCfUmGdTdT |
| | (SEQ ID NO: 50) | (SEQ ID NO: 51) |
| C006 | mCmCmAfAmGfGmCfGmUfCmAfAmGf | fGfUmGfUmGfGmGfUmGfCmUfUm |
| | CmAfCmCfCmAfCmAfCinvdT | GfAmCfGmCfCmUdTdT |
| | (SEQ ID NO: 52) | (SEQ ID NO: 53) |
| C007 | mCmCmAfCmGfUmCfAmAfGmCfAmCf | fAfGmGfGmUfGmUfGmGfGmUfGm |
| | CmCfAmCfAmCfCmCfUinvdT | CfUmUfGmAfCmGdTdT |
| | (SEQ ID NO: 54) | (SEQ ID NO: 55) |
| C008 | mCmCmAfGmUfCmAfAmGfCmAfCmCf | fUfAmGfGmGfUmGfUmGfGmGfUm |
| | CmAfCmAfCmCfCmUfAinvdT | GfCmUfUmGfAmCdTdT |
| | (SEQ ID NO: 56) | (SEQ ID NO: 57) |
| C009 | mCmCmAfUmCfAmAfGmCfAmCfCmCf | fCfUmAfGmGfGmUfGmUfGmGfGm |
| | AmCfAmCfCmCfUmAfGinvdT | UfGmCfUmUfGmAdTdT |
| | (SEQ ID NO: 58) | (SEQ ID NO: 59) |
| C010 | mCmCmAfCmAfAmGfCmAfCmCfCmAf | fUfCmUfAmGfGmGfUmGfUmGfGm |
| | CmAfCmCfCmUfAmGfAinvdT | GfUmGfCmUfUmGdTdT |
| | (SEQ ID NO: 60) | (SEQ ID NO: 61) |
| C011 | mCmCmAfAmAfGmCfAmCfCmCfAmCf | fUfUmCfUmAfGmGfGmUfGmUfGm |
| | AmCfCmCfUmAfGmAfAinvdT | GfGmUfGmCfUmUdTdT |
| | (SEQ ID NO: 62) | (SEQ ID NO: 63) |
| C012 | mCmCmAfAmGfCmAfCmCfCmAfCmAf | fCfUmUfCmUfAmGfGmGfUmGfUm |
| | CmCfCmUfAmGfAmAfGinvdT | GfGmGfUmGfCmUdTdT |
| | (SEQ ID NO: 64) | (SEQ ID NO: 65) |
| C013 | mCmCmAfGmCfAmCfCmCfAmCfAmCf | fCfCmUfUmCfUmAfGmGfGmUfGm |
| | CmCfUmAfGmAfAmGfGinvdT | UfGmGfGmUfGmCdTdT |
| | (SEQ ID NO: 66) | (SEQ ID NO: 67) |
| C014 | mCmCmAfCmAfCmCfCmAfCmAfCmCf | fAfCmCfUmUfCmUfAmGfGmGfUm |
| | CmUfAmGfAmAfGmGfUinvdT | GfUmGfGmGfUmGdTdT |
| | (SEQ ID NO: 68) | (SEQ ID NO: 69) |
| C015 | mCmCmAfAmCfCmCfAmCfAmCfCmCf | fAfAmCfCmUfUmCfUmAfGmGfGm |
| | UmAfGmAfAmGfGmUfUinvdT | UfGmUfGmGfGmUdTdT |
| | (SEQ ID NO: 70) | (SEQ ID NO: 71) |
| C016 | mCmCmAfCmCfCmAfCmAfCmCfCmUf | fAfAmAfCmCfUmUfCmUfAmGfGm |
| | AmGfAmAfGmGfUmUfUinvdT | GfUmGfUmGfGmGdTdT |
| | (SEQ ID NO: 72) | (SEQ ID NO: 73) |
| C017 | mCmCmAfCmCfAmCfAmCfCmCfUmAf | fGfAmAfAmCfCmUfUmCfUmAfGm |
| | GmAfAmGfGmUfUmUfCinvdT | GfGmUfGmUfGmGdTdT |
| | (SEQ ID NO: 74) | (SEQ ID NO: 75) |
| C018 | mCmCmAfCmAfCmAfCmCfCmUfAmGf | fGfGmAfAmAfCmCfUmUfCmUfAm |
| | AmAfGmGfUmUfUmCfCinvdT | GfGmGfUmGfUmGdTdT |
| | (SEQ ID NO: 76) | (SEQ ID NO: 77) |
| C019 | mCmCmAfAmCfAmCfCmCfUmAfGmAf | fCfGmGfAmAfAmCfCmUfUmCfUmA |
| | AmGfGmUfUmUfCmCfGinvdT | fGmGfGmUfGmUdTdT |
| | (SEQ ID NO: 78) | (SEQ ID NO: 79) |
| C020 | mCmCmAfCmAfCmCfCmUfAmGfAmAf | fGfCmGfGmAfAmAfCmCfUmUfCmU |
| | GmGfUmUfUmCfCmGfCinvdT | fAmGfGmGfUmGdTdT |
| | (SEQ ID NO: 80) | (SEQ ID NO: 81) |
| C021 | mCmCmAfAmCfCmCfUmAfGmAfAmGf | fUfGmCfGmGfAmAfAmCfCmUfUmC |
| | GmUfUmUfCmCfGmCfAinvdT | fUmAfGmGfGmUdTdT |
| | (SEQ ID NO: 82) | (SEQ ID NO: 83) |
| C022 | mCmCmAfCmCfCmUfAmGfAmAfGmGf | fCfUmGfCmGfGmAfAmAfCmCfUmU |
| | UmUfUmCfCmGfCmAfGinvdT | fCmUfAmGfGmGdTdT |
| | (SEQ ID NO: 84) | (SEQ ID NO: 85) |
| C023 | mCmCmAfCmCfUmAfGmAfAmGfGmUf | fGfCmUfGmCfGmGfAmAfAmCfCmU |
| | UmUfCmCfGmCfAmGfCinvdT | fUmCfUmAfGmGdTdT |
| | (SEQ ID NO: 86) | (SEQ ID NO: 87) |
| C024 | mCmCmAfCmUfAmGfAmAfGmGfUmU | fCfGmCfUmGfCmGfGmAfAmAfCmC |
| | fUmCfCmGfCmAfGmCfGinvdT | fUmUfCmUfAmGdTdT |
| | (SEQ ID NO: 88) | (SEQ ID NO: 89) |
| C025 | mCmCmAfUmAfGmAfAmGfGmUfUmU | fUfCmGfCmUfGmCfGmGfAmAfAmC |
| | fCmCfGmCfAmGfCmGfAinvdT | fCmUfUmCfUmAdTdT |
| | (SEQ ID NO: 90) | (SEQ ID NO: 91) |
| C026 | mCmCmAfAmGfAmAfGmGfUmUfUmC | fGfUmCfGmCfUmGfCmGfGmAfAm |
| | fCmGfCmAfGmCfGmAfCinvdT | AfCmCfUmUfCmUdTdT |
| | (SEQ ID NO: 92) | (SEQ ID NO: 93) |
| C027 | mCmCmAfGmAfAmGfGmUfUmUfCmCf | fCfGmUfCmGfCmUfGmCfGmGfAmA |
| | GmCfAmGfCmGfAmCfGinvdT | fAmCfCmUfUmCdTdT |
| | (SEQ ID NO: 94) | (SEQ ID NO: 95) |
| C028 | mCmCmAfAmAfGmGfUmUfUmCfCmGf | fAfCmGfUmCfGmCfUmGfCmGfGmA |
| | CmAfGmCfGmAfCmGfUinvdT | fAmAfCmCfUmUdTdT |
| | (SEQ ID NO: 96) | (SEQ ID NO: 97) |
| C029 | mCmCmAfAmGfGmUfUmUfCmCfGmCf | fGfAmCfGmUfCmGfCmUfGmCfGmG |
| | AmGfCmGfAmCfGmUfCinvdT | fAmAfAmCfCmUdTdT |
| | (SEQ ID NO: 98) | (SEQ ID NO: 99) |
| C030 | mCmCmAfGmUfUmUfCmCfGmCfAmGf | fUfCmGfAmCfGmUfCmGfCmUfGmC |
| | CmGfAmCfGmUfCmGfAinvdT | fGmGfAmAfAmCdTdT |
| | (SEQ ID NO: 100) | (SEQ ID NO: 101) |
| C031 | mCmCmAfUmUfUmCfCmGfCmAfGmCf | fCfUmCfGmAfCmGfUmCfGmCfUmG |
| | GmAfCmGfUmCfGmAfGinvdT | fCmGfGmAfAmAdTdT |
| | (SEQ ID NO: 102) | (SEQ ID NO: 103) |
| C032 | mCmCmAfCmCfUmGfAmAfCmUfUmCf | fGfCmAfGmGfAmGfCmUfGmAfAm |
| | AmGfCmUfCmCfUmGfCinvdT | GfUmUfCmAfGmGdTdT |
| | (SEQ ID NO: 104) | (SEQ ID NO: 105) |
| C033 | mCmCmAfCmUfGmAfAmCfUmUfCmAf | fUfGmCfAmGfGmAfGmCfUmGfAm |
| | GmCfUmCfCmUfGmCfAinvdT | AfGmUfUmCfAmGdTdT |
| | (SEQ ID NO: 106) | (SEQ ID NO: 107) |
| C034 | mCmCmAfUmGfAmAfCmUfUmCfAmGf | fGfUmGfCmAfGmGfAmGfCmUfGm |
| | CmUfCmCfUmGfCmAfCinvdT | AfAmGfUmUfCmAdTdT |
| | (SEQ ID NO: 108) | (SEQ ID NO: 109) |
| C035 | mCmCmAfGmGfAmCfAmGfCmAfAmCf | fAfGmGfGmGfAmGfAmGfGmUfUm |
| | CmUfCmUfCmCfCmCfUinvdT | GfCmUfGmUfCmCdTdT |
| | (SEQ ID NO: 110) | (SEQ ID NO: 111) |
| C036 | mCmCmAfGmAfCmAfGmCfAmAfCmCf | fCfAmGfGmGfGmAfGmAfGmGfUm |
| | UmCfUmCfCmCfCmUfGinvdT | UfGmCfUmGfUmCdTdT |
| | (SEQ ID NO: 112) | (SEQ ID NO: 113) |
| C037 | mCmCmAfAmCfAmGfCmAfAmCfCmUf | fCfCmAfGmGfGmGfAmGfAmGfGm |
| | CmUfCmCfCmCfUmGfGinvdT | UfUmGfCmUfGmUdTdT |
| | (SEQ ID NO: 114) | (SEQ ID NO: 115) |
| C038 | mCmCmAfAmUfGmGfGmCfAmCfCmGf | fUfGmGfAmGfCmUfGmAfCmGfGm |
| | UmCfAmGfCmUfCmCfAinvdT | UfGmCfCmCfAmUdTdT |
| | (SEQ ID NO: 116) | (SEQ ID NO: 117) |
| C039 | mCmCmAfGmGfAmUfGmAfAmUfAmC | fGfGmGfGmGfGmCfUmGfGmUfAm |
| | fCmAfGmCfCmCfCmCfCinvdT | UfUmCfAmUfCmCdTdT |
| | (SEQ ID NO: 118) | (SEQ ID NO: 119) |
| C040 | mCmCmAfGmAfUmGfAmAfUmAfCmCf | fCfGmGfGmGfGmGfCmUfGmGfUm |
| | AmGfCmCfCmCfCmCfGinvdT | AfUmUfCmAfUmCdTdT |
| | (SEQ ID NO: 120) | (SEQ ID NO: 121) |
| C041 | mCmCmAfAmUfGmAfAmUfAmCfCmAf | fUfCmGfGmGfGmGfGmCfUmGfGm |
| | GmCfCmCfCmCfCmGfAinvdT | UfAmUfUmCfAmUdTdT |
| | (SEQ ID NO: 122) | (SEQ ID NO: 123) |
| C042 | mCmCmAfCmAfAmGfGmGfGmGfCmAf | fAfGmAfCmCfAmGfCmUfUmGfCmC |
| | AmGfCmUfGmGfUmCfUinvdT | fCmCfCmUfUmGdTdT |
| | (SEQ ID NO: 124) | (SEQ ID NO: 125) |
| C043 | mCmCmAfAmAfGmGfGmGfGmCfAmA | fCfAmGfAmCfCmAfGmCfUmUfGmC |
| | fGmCfUmGfGmUfCmUfGinvdT | fCmCfCmCfUmUdTdT |
| | (SEQ ID NO: 126) | (SEQ ID NO: 127) |
| C044 | mCmCmAfUmGfGmAfCmCfCmUfGmAf | fUfGmCfAmGfCmCfAmGfUmCfAmG |
| | CmUfGmGfCmUfGmCfAinvdT | fGmGfUmCfCmAdTdT |
| | (SEQ ID NO: 128) | (SEQ ID NO: 129) |
| C045 | mCmCmAfGmAfCmCfCmUfGmAfCmUf | fAfCmUfGmCfAmGfCmCfAmGfUmC |
| | GmGfCmUfGmCfAmGfUinvdT | fAmGfGmGfUmCdTdT |
| | (SEQ ID NO: 130) | (SEQ ID NO: 131) |
| C046 | mCmCmAfUmGfAmCfUmGfGmCfUmGf | fAfGmGfGmCfAmCfUmGfCmAfGmC |
| | CmAfGmUfGmCfCmCfUinvdT | fCmAfGmUfCmAdTdT |
| | (SEQ ID NO: 132) | (SEQ ID NO: 133) |
| C047 | mCmCmAfUmCfUmUfCmCfCmAfUmGf | fUfCmCfCmCfUmAfUmCfCmAfUmG |
| | GmAfUmAfGmGfGmGfAinvdT | fGmGfAmAfGmAdTdT |
| | (SEQ ID NO: 134) | (SEQ ID NO: 135) |
| C048 | mCmCmAfCmUfUmCfCmCfAmUfGmGf | fCfUmCfCmCfCmUfAmUfCmCfAmU |
| | AmUfAmGfGmGfGmAfGinvdT | fGmGfGmAfAmGdTdT |
| | (SEQ ID NO: 136) | (SEQ ID NO: 137) |
| C049 | mCmCmAfUmUfCmCfCmAfUmGfGmAf | fCfCmUfCmCfCmCfUmAfUmCfCmA |
| | UmAfGmGfGmGfAmGfGinvdT | fUmGfGmGfAmAdTdT |
| | (SEQ ID NO: 138) | (SEQ ID NO: 139) |
| C050 | mCmCmAfGmUfAmGfGmGfGmCfUmG | fUfUmGfUmCfCmCfUmGfCmAfGmC |
| | fCmAfGmGfGmAfCmAfAinvdT | fCmCfCmUfAmCdTdT |
| | (SEQ ID NO: 140) | (SEQ ID NO: 141) |
| C051 | mCmCmAfGmAfGmUfGmUfGmAfAmA | fAfUmCfAmGfCmAfCmCfUmUfUmC |
| | fGmGfUmGfCmUfGmAfUinvdT | fAmCfAmCfUmCdTdT |
| | (SEQ ID NO: 142) | (SEQ ID NO: 143) |
| C052 | mCmCmAfAmGfUmGfUmGfAmAfAmG | fCfAmUfCmAfGmCfAmCfCmUfUmU |
| | fGmUfGmCfUmGfAmUfGinvdT | fCmAfCmAfCmUdTdT |
| | (SEQ ID NO: 144) | (SEQ ID NO: 145) |
| C053 | mCmCmAfGmUfGmUfGmAfAmAfGmG | fCfCmAfUmCfAmGfCmAfCmCfUmU |
| | fUmGfCmUfGmAfUmGfGinvdT | fUmCfAmCfAmCdTdT |
| | (SEQ ID NO: 146) | (SEQ ID NO: 147) |
| C054 | mCmCmAfUmGfUmGfAmAfAmGfGmU | fGfCmCfAmUfCmAfGmCfAmCfCmU |
| | fGmCfUmGfAmUfGmGfCinvdT | fUmUfCmAfCmAdTdT |
| | (SEQ ID NO: 148) | (SEQ ID NO: 149) |
| C055 | mCmCmAfGmUfGmAfAmAfGmGfUmG | fGfGmCfCmAfUmCfAmGfCmAfCmC |
| | fCmUfGmAfUmGfGmCfCinvdT | fUmUfUmCfAmCdTdT |
| | (SEQ ID NO: 150) | (SEQ ID NO: 151) |
| C056 | mCmCmAfGmCfUmGfUmGfCmCfUmUf | fCfAmGfGmAfAmAfCmCfAmAfGm |
| | GmGfUmUfUmCfCmUfGinvdT | GfCmAfCmAfGmCdTdT |
| | (SEQ ID NO: 152) | (SEQ ID NO: 153) |
| C057 | mCmCmAfUmGfUmGfCmCfUmUfGmGf | fCfUmCfAmGfGmAfAmAfCmCfAmA |
| | UmUfUmCfCmUfGmAfGinvdT | fGmGfCmAfCmAdTdT |
| | (SEQ ID NO: 154) | (SEQ ID NO: 155) |
| C058 | mCmCmAfAmAfCmAfCmCfCmAfAmAf | fCfAmGfGmCfCmAfCmCfUmUfUmG |
| | GmGfUmGfGmCfCmUfGinvdT | fGmGfUmGfUmUdTdT |
| | (SEQ ID NO: 156) | (SEQ ID NO: 157) |
| C059 | mCmCmAfAmCfAmCfCmCfAmAfAmGf | fGfCmAfGmGfCmCfAmCfCmUfUmU |
| | GmUfGmGfCmCfUmGfCinvdT | fGmGfGmUfGmUdTdT |
| | (SEQ ID NO: 158) | (SEQ ID NO: 159) |
| C060 | mCmCmAfGmAfAmGfAmAfAmCfCmUf | fUfCmUfGmGfUmUfCmCfAmGfGm |
| | GmGfAmAfCmCfAmGfAinvdT | UfUmUfCmUfUmCdTdT |
| | (SEQ ID NO: 160) | (SEQ ID NO: 161) |
| C209.016 | mCmCmAfUmUfAmUfUmAfAmUfAmU | fAfAmAfGmUfCmAfCmCfAmUfAm |
| | fGmGfUmGfAmCfUmUfUinvdT (SEQ ID | UfUmAfAmUfAmAdTdT (SEQ ID |
| | NO: 346) | NO: 347) |
| C217.013 | mCmCmAfAmUfAmUfGmGfUmGfAmC | fUfUmUfUmAfAmAfAmAfGmUfCm |
| | fUmUfUmUfUmAfAmAfAinvdT (SEQ | AfCmCfAmUfAmUdtdt (SEQ ID NO: |
| | ID NO: 348) | 349) |
| C218.003 | mCmCmAfAmUfUmUfUmUfAmUfUmA | fAfGmUfCmAfCmCfAmUfAmUfUm |
| | fAmUfAmUfGmGfUmGfAmCfUinvdT | AfAmUfAmAfAmAfAmUdTdT (SEQ |
| | (SEQ ID NO: 350) | ID NO: 351) |
| C218.005 | mCmCmAfUmUfUmUfAmUfUmAfAmU | fAfAmAfGmUfCmAfCmCfAmUfAm |
| | fAmUfGmGfUmGfAmCfUmUfUinvdT | UfUmAfAmUfAmAfAmAdTdT (SEQ |
| | (SEQ ID NO: 352) | ID NO: 353) |
| C218.006 | mCmCmAfUmUfUmAfUmUfAmAfUmA | fAfAmAfAmGfUmCfAmCfCmAfUm |
| | fUmGfGmUfGmAfCmUfUmUfUinvdT | AfUmUfAmAfUmAfAmAdTdT (SEQ |
| | (SEQ ID NO: 354) | ID NO: 355) |
| C218.008 | mCmCmAfUmAfUmUfAmAfUmAfUmG | fUfAmAfAmAfAmGfUmCfAmCfCm |
| | fGmUfGmAfCmUfUmUfUmUfAinvdT | AfUmAfUmUfAmAfUmAdTdT |
| | (SEQ ID NO: 356) | (SEQ ID NO: 357) |
| C218.012 | mCmCmAfAmAfUmAfUmGfGmUfGmA | fAfUmUfUmUfAmAfAmAfAmGfUm |
| | fCmUfUmUfUmUfAmAfAmAfUinvdT | CfAmCfCmAfUmAfUmUdTdT (SEQ |
| | (SEQ ID NO: 358) | ID NO: 359) |
| C219.001 | mCmCmAfGmCfAmUfUmUfUmUfAmUfUm | fAfGmUfCmAfCmCfAmUfAmUfUmAfA |
| | AfAmUfAmUfGmGfUmGfAmCfUinvdT | mUfAmAfAmAfAmUfGmCdTdT (SEQ |
| | (SEQ ID NO: 360) | ID NO: 361) |
| C219.003 | mCmCmAfAmUfUmUfUmUfAmUfUmAfAm | fAfAmAfGmUfCmAfCmCfAmUfAmUfU |
| | UfAmUfGmGfUmGfAmCfUmUfUinvdT | mAfAmUfAmAfAmAfAmUdTdT (SEQ |
| | (SEQ ID NO: 362) | ID NO: 363) |
| C219.004 | mCmCmAfUmUfUmUfUmAfUmUfAmAfUm | fAfAmAfAmGfUmCfAmCfCmAfUmAfU |
| | AfUmGfGmUfGmAfCmUfUmUfUinvdT | mUfAmAfUmAfAmAfAmAdTdT (SEQ |
| | (SEQ ID NO: 364) | ID NO: 365) |
| C219.006 | mCmCmAfUmUfUmAfUmUfAmAfUmAfUm | fUfAmAfAmAfAmGfUmCfAmCfCmAfU |
| | GfGmUfGmAfCmUfUmUfUmUfAinvdT | mAfUmUfAmAfUmAfAmAdTdT (SEQ |
| | (SEQ ID NO: 366) | ID NO: 367) |
| C219.007 | mCmCmAfUmUfAmUfUmAfAmUfAmUfGm | fUfUmAfAmAfAmAfGmUfCmAfCmCfA |
| | GfUmGfAmCfUmUfUmUfUmAfAinvdT | mUfAmUfUmAfAmUfAmAdTdT (SEQ |
| | (SEQ ID NO: 368) | ID NO: 369) |
| C209.001 | mCmCmAfCmAfGmGfAmCfAmGfCmAf | fGfGmGfAmGfAmGfGmUfUmGfCm |
| | AmCfCmUfCmUfCmCfCinvdT (SEQ ID | UfGmUfCmCfUmGdTdT (SEQ ID |
| | NO: 484) | NO: 485) |
| C209.002 | mCmCmAfAmGfGmAfCmAfGmCfAmAf | fGfGmGfGmAfGmAfGmGfUmUfGm |
| | CmCfUmCfUmCfCmCfCinvdT (SEQ ID | CfUmGfUmCfCmUdTdT (SEQ ID NO: |
| | NO: 486) | 487) |
| C209.003 | mCmCmAfUmGfCmCfAmCfUmGfCmUf | fAfGmCfAmGfCmAfGmCfAmGfCmA |
| | GmCfUmGfCmUfGmCfUinvdT (SEQ ID | fGmUfGmGfCmAdTdT (SEQ ID NO: |
| | NO: 488) | 489) |
| C209.004 | mCmCmAfCmAfCmUfGmCfUmGfCmUf | fAfGmCfAmGfCmAfGmCfAmGfCmA |
| | GmCfUmGfCmUfGmCfUinvdT (SEQ ID | fGmCfAmGfUmGdTdT (SEQ ID NO: |
| | NO: 490) | 491) |
| C209.005 | mCmCmAfUmGfCmUfGmCfUmGfCmUf | fAfGmGfAmGfCmAfGmCfAmGfCm |
| | GmCfUmGfCmUfCmCfUinvdT (SEQ ID | AfGmCfAmGfCmAdTdT (SEQ ID |
| | NO: 492) | NO: 493) |
| C209.006 | mCmCmAfAmCfCmCfUmGfAmCfUmGf | fCfAmCfUmGfCmAfGmCfCmAfGmU |
| | GmCfUmGfCmAfGmUfGinvdT (SEQ ID | fCmAfGmGfGmUdTdT (SEQ ID NO: |
| | NO: 494) | 495) |
| C209.007 | mCmCmAfUmGfAmAfAmGfGmUfGmC | fGfGmGfCmCfAmUfCmAfGmCfAmC |
| | fUmGfAmUfGmGfCmCfCinvdT (SEQ ID | fCmUfUmUfCmAdTdT (SEQ ID NO: |
| | NO: 496) | 497) |
| C209.008 | mCmCmAfGmGfCmUfGmUfGmCfCmUf | fAfGmGfAmAfAmCfCmAfAmGfGm |
| | UmGfGmUfUmUfCmCfUinvdT (SEQ ID | CfAmCfAmGfCmCdTdT (SEQ ID NO: |
| | NO: 498) | 499) |
| C209.009 | mCmCmAfCmUfGmUfGmCfCmUfUmGf | fUfCmAfGmGfAmAfAmCfCmAfAm |
| | GmUfUmUfCmCfUmGfAinvdT (SEQ ID | GfGmCfAmCfAmGdTdT (SEQ ID |
| | NO: 500) | NO: 501) |
| C209.010 | mCmCmAfGmGfAmAfGmAfAmAfCmCf | fCfUmGfGmUfUmCfCmAfGmGfUm |
| | UmGfGmAfAmCfCmAfGinvdT (SEQ ID | UfUmCfUmUfCmCdTdT (SEQ ID NO: |
| | NO: 502) | 503) |
| C209.011 | mCmCmAfAmAfGmAfAmAfCmCfUmGf | fCfUmCfUmGfGmUfUmCfCmAfGmG |
| | GmAfAmCfCmAfGmAfGinvdT (SEQ ID | fUmUfUmCfUmUdTdT (SEQ ID NO: |
| | NO: 504) | 505) |
| C209.012 | mCmCmAfAmGfAmAfAmCfCmUfGmGf | fCfCmUfCmUfGmGfUmUfCmCfAmG |
| | AmAfCmCfAmGfAmGfGinvdT (SEQ ID | fGmUfUmUfCmUdTdT (SEQ ID NO: |
| | NO: 506) | 507) |
| C209.013 | mCmCmAfAmAfCmCfUmGfGmAfAmCf | fCfCmCfCmCfUmCfUmGfGmUfUmC |
| | CmAfGmAfGmGfGmGfGinvdT (SEQ ID | fCmAfGmGfUmUdTdT (SEQ ID NO: |
| | NO: 508) | 509) |
| C209.014 | mCmCmAfCmAfUmUfUmUfUmAfUmU | fCfAmCfCmAfUmAfUmUfAmAfUm |
| | fAmAfUmAfUmGfGmUfGinvdT (SEQ | AfAmAfAmAfUmGdTdT (SEQ ID |
| | ID NO: 510) | NO: 511) |
| C209.015 | mCmCmAfAmUfUmUfUmUfAmUfUmA | fUfCmAfCmCfAmUfAmUfUmAfAm |
| | fAmUfAmUfGmGfUmGfAinvdT (SEQ | UfAmAfAmAfAmUdTdT (SEQ ID |
| | ID NO: 512) | NO: 513) |
| C209.017 | mCmCmAfAmAfUmAfUmGfGmUfGmA | fUfUmUfAmAfAmAfAmGfUmCfAm |
| | fCmUfUmUfUmUfAmAfAinvdT (SEQ ID | CfCmAfUmAfUmUdTdT (SEQ ID |
| | NO: 514) | NO: 515) |
| C209.018 | mCmCmAfAmUfAmUfGmGfUmGfAmC | fUfUmUfUmAfAmAfAmAfGmUfCm |
| | fUmUfUmUfUmAfAmAfAinvdT (SEQ | AfCmCfAmUfAmUdTdT (SEQ ID |
| | ID NO: 516) | NO: 517) |
| C209.019 | mCmCmAfAmUfGmGfUmGfAmCfUmU | fUfAmUfUmUfUmAfAmAfAmAfGm |
| | fUmUfUmAfAmAfAmUfAinvdT (SEQ | UfCmAfCmCfAmUdTdT (SEQ ID NO: |
| | ID NO: 518) | 519) |
| C209.020 | mCmCmAfUmGfGmUfGmAfCmUfUmU | fUfUmAfUmUfUmUfAmAfAmAfAm |
| | fUmUfAmAfAmAfUmAfAinvdT (SEQ | GfUmCfAmCfCmAdTdT (SEQ ID NO: |
| | ID NO: 520) | 521) |
| C209.021 | mCmCmAfGmGfUmGfAmCfUmUfUmU | fUfUmUfAmUfUmUfUmAfAmAfAm |
| | fUmAfAmAfAmUfAmAfAinvdT (SEQ | AfGmUfCmAfCmCdTdT (SEQ ID NO: |
| | ID NO: 522) | 523) |
| C209.022 | mCmCmAfGmUfGmAfCmUfUmUfUmU | fUfUmUfUmAfUmUfUmUfAmAfAm |
| | fAmAfAmAfUmAfAmAfAinvdT (SEQ | AfAmGfUmCfAmCdTdT (SEQ ID |
| | ID NO: 524) | NO: 525) |
| C209.023 | mCmCmAfUmGfAmCfUmUfUmUfUmA | fUfUmUfUmUfAmUfUmUfUmAfAm |
| | fAmAfAmUfAmAfAmAfAinvdT (SEQ | AfAmAfGmUfCmAdTdT (SEQ ID |
| | ID NO: 526) | NO: 527) |
| C209.024 | mCmCmAfGmAfCmUfUmUfUmUfAmA | fGfUmUfUmUfUmAfUmUfUmUfAm |
| | fAmAfUmAfAmAfAmAfCinvdT (SEQ ID | AfAmAfAmGfUmCdTdT (SEQ ID |
| | NO: 528) | NO: 529) |
| C209.025 | mCmCmAfAmCfUmUfUmUfUmAfAmA | fUfGmUfUmUfUmUfAmUfUmUfUm |
| | fAmUfAmAfAmAfAmCfAinvdT (SEQ ID | AfAmAfAmAfGmUdTdT (SEQ ID |
| | NO: 530) | NO: 531) |
| C209.026 | mCmCmAfCmUfUmUfUmUfAmAfAmA | fUfUmGfUmUfUmUfUmAfUmUfUm |
| | fUmAfAmAfAmAfCmAfAinvdT (SEQ ID | UfAmAfAmAfAmGdTdT (SEQ ID |
| | NO: 532) | NO: 533) |
| C209.027 | mCmCmAfUmUfUmUfUmAfAmAfAmU | fUfUmUfGmUfUmUfUmUfAmUfUm |
| | fAmAfAmAfAmCfAmAfAinvdT (SEQ ID | UfUmAfAmAfAmAdTdT (SEQ ID |
| | NO: 534) | NO: 535) |
| C209.028 | mCmCmAfUmUfUmUfAmAfAmAfUmA | fGfUmUfUmGfUmUfUmUfUmAfUm |
| | fAmAfAmAfCmAfAmAfCinvdT (SEQ ID | UfUmUfAmAfAmAdTdT (SEQ ID |
| | NO: 536) | NO: 537) |
| C209.029 | mCmCmAfUmUfUmAfAmAfAmUfAmA | fUfGmUfUmUfGmUfUmUfUmUfAm |
| | fAmAfAmCfAmAfAmCfAinvdT (SEQ ID | UfUmUfUmAfAmAdTdT (SEQ ID |
| | NO: 538) | NO: 539) |
| C217.002 | mCmCmAfCmAfUmUfUmUfUmAfUmU | fCfAmCfCmAfUmAfUmUfAmAfUm |
| | fAmAfUmAfUmGfGmUfGinvdT (SEQ | AfAmAfAmAfUmGdTdT (SEQ ID |
| | ID NO: 540) | NO: 541) |
| C217.003 | mCmCmAfAmUfUmUfUmUfAmUfUmA | fUfCmAfCmCfAmUfAmUfUmAfAm |
| | fAmUfAmUfGmGfUmGfAinvdT (SEQ | UfAmAfAmAfAmUdTdT (SEQ ID |
| | ID NO: 542) | NO: 543) |
| C217.004 | mCmCmAfUmUfUmUfUmAfUmUfAmA | fGfUmCfAmCfCmAfUmAfUmUfAm |
| | fUmAfUmGfGmUfGmAfCinvdT (SEQ ID | AfUmAfAmAfAmAdTdT (SEQ ID |
| | NO: 544) | NO: 545) |
| C217.006 | mCmCmAfUmUfUmUfAmUfUmAfAmU | fAfGmUfCmAfCmCfAmUfAmUfUm |
| | fAmUfGmGfUmGfAmCfUinvdT (SEQ ID | AfAmUfAmAfAmAdTdT (SEQ ID |
| | NO: 546) | NO: 547) |
| C217.007 | mCmCmAfUmUfUmAfUmUfAmAfUmA | fAfAmGfUmCfAmCfCmAfUmAfUm |
| | fUmGfGmUfGmAfCmUfUinvdT (SEQ ID | UfAmAfUmAfAmAdTdT (SEQ ID |
| | NO: 548) | NO: 549) |
| C217.012 | mCmCmAfAmAfUmAfUmGfGmUfGmA | fUfUmUfAmAfAmAfAmGfUmCfAm |
| | fCmUfUmUfUmUfAmAfAinvdT (SEQ ID | CfCmAfUmAfUmUdTdT (SEQ ID |
| | NO: 550) | NO: 551) |
| C218.001 | mCmCmAfGmCfAmUfUmUfUmUfAmU | fUfCmAfCmCfAmUfAmUfUmAfAm |
| | fUmAfAmUfAmUfGmGfUmGfAinvdT | UfAmAfAmAfAmUfGmCdTdT (SEQ |
| | (SEQ ID NO: 552) | ID NO: 553) |
| C218.002 | mCmCmAfCmAfUmUfUmUfUmAfUmU | fGfUmCfAmCfCmAfUmAfUmUfAm |
| | fAmAfUmAfUmGfGmUfGmAfCinvdT | AfUmAfAmAfAmAfUmGdTdT (SEQ |
| | (SEQ ID NO: 554) | ID NO: 555) |
| C218.004 | mCmCmAfUmUfUmUfUmAfUmUfAmA | fAfAmGfUmCfAmCfCmAfUmAfUm |
| | fUmAfUmGfGmUfGmAfCmUfUinvdT | UfAmAfUmAfAmAfAmAdTdT (SEQ |
| | (SEQ ID NO: 556) | ID NO: 557) |
| C218.007 | mCmCmAfUmUfAmUfUmAfAmUfAmU | fAfAmAfAmAfGmUfCmAfCmCfAm |
| | fGmGfUmGfAmCfUmUfUmUfUinvdT | UfAmUfUmAfAmUfAmAdTdT (SEQ |
| | (SEQ ID NO: 558) | ID NO: 559) |
| C218.009 | mCmCmAfAmUfUmAfAmUfAmUfGmG | fUfUmAfAmAfAmAfGmUfCmAfCm |
| | fUmGfAmCfUmUfUmUfUmAfAinvdT | CfAmUfAmUfUmAfAmUdTdT (SEQ |
| | (SEQ ID NO: 560) | ID NO: 561) |
| C218.010 | mCmCmAfUmUfAmAfUmAfUmGfGmU | fUfUmUfAmAfAmAfAmGfUmCfAm |
| | fGmAfCmUfUmUfUmUfAmAfAinvdT | CfCmAfUmAfUmUfAmAdTdT (SEQ |
| | (SEQ ID NO: 562) | ID NO: 563) |
| C218.011 | mCmCmAfUmAfAmUfAmUfGmGfUmG | fUfUmUfUmAfAmAfAmAfGmUfCm |
| | fAmCfUmUfUmUfUmAfAmAfAinvdT | AfCmCfAmUfAmUfUmAdTdT (SEQ |
| | (SEQ ID NO: 564) | ID NO: 565) |
| C219.002 | mCmCmAfCmAfUmUfUmUfUmAfUmU | fAfAmGfUmCfAmCfCmAfUmAfUm |
| | fAmAfUmAfUmGfGmUfGmAfCmUfUin | UfAmAfUmAfAmAfAmAfUmGdTdT |
| | vdT (SEQ ID NO: 566) | (SEQ ID NO: 567) |
| C219.005 | mCmCmAfUmUfUmUfAmUfUmAfAmU | fAfAmAfAmAfGmUfCmAfCmCfAm |
| | fAmUfGmGfUmGfAmCfUmUfUmUfUin | UfAmUfUmAfAmUfAmAfAmAdTdT |
| | vdT (SEQ ID NO: 568) | (SEQ ID NO: 569) |
| C219.008 | mCmCmAfUmAfUmUfAmAfUmAfUmG | fUfUmUfAmAfAmAfAmGfUmCfAm |
| | fGmUfGmAfCmUfUmUfUmUfAmAfAin | CfCmAfUmAfUmUfAmAfUmAdTdT |
| | vdT (SEQ ID NO: 570) | (SEQ ID NO: 571) |
| C219.009 | mCmCmAfAmUfUmAfAmUfAmUfGmG | fUfUmUfUmAfAmAfAmAfGmUfCm |
| | fUmGfAmCfUmUfUmUfUmAfAmAfAin | AfCmCfAmUfAmUfUmAfAmUdTdT |
| | vdT (SEQ ID NO: 572) | (SEQ ID NO: 573) |
| C219.010 | mCmCmAfUmUfAmAfUmAfUmGfGmU | fAfUmUfUmUfAmAfAmAfAmGfUm |
| | fGmAfCmUfUmUfUmUfAmAfAmAfUin | CfAmCfCmAfUmAfUmUfAmAdTdT |
| | vdT (SEQ ID NO: 574) | (SEQ ID NO: 575) |

mX = 2′-O-Me nucleotide
fX = 2′-F nucleotide
dX = DNA nucleotide
invdX = inverted dX

TABLE 3
siRNA sequences (without O-Me and F modifications).

| | Sequence sense strand 5′-->3′ | Sequence antisense strand 5′-->3′ |
|---|---|---|
| siRNA ID | (SEQ ID NO) | (SEQ ID NO) |
| B001 | CCAUUGUAGCAUUUUUAUUAAUinvdT | AUUAAUAAAAAUGCUACAAdTdT |
| | (SEQ ID NO: 162) | (SEQ ID NO: 163) |
| B002 | CCAUGUAGCAUUUUUAUUAAUAinvdT | UAUUAAUAAAAAUGCUACAdTdT |
| | (SEQ ID NO: 164) | (SEQ ID NO: 165) |
| B003 | CCAGUAGCAUUUUUAUUAAUAUinvdT | AUAUUAAUAAAAAUGCUACdTdT |
| | (SEQ ID NO: 166) | (SEQ ID NO: 167) |
| B004 | CCAUAGCAUUUUUAUUAAUAUGinvdT | CAUAUUAAUAAAAAUGCUAdTdT |
| | (SEQ ID NO: 168) | (SEQ ID NO: 169) |
| B005 | CCAAGCAUUUUUAUUAAUAUGGinvdT | CCAUAUUAAUAAAAAUGCUdTdT |
| | (SEQ ID NO: 170) | (SEQ ID NO: 171) |
| B006 | CCAGCAUUUUUAUUAAUAUGGUinvdT | ACCAUAUUAAUAAAAAUGCdTdT |
| | (SEQ ID NO: 172) | (SEQ ID NO: 173) |
| B007 | CCAUUUUUAUUAAUAUGGUGACinvdT | GUCACCAUAUUAAUAAAAAdTdT |
| | (SEQ ID NO: 174) | (SEQ ID NO: 175) |
| B008 | CCAUUUUAUUAAUAUGGUGACUinvdT | AGUCACCAUAUUAAUAAAAdTdT |
| | (SEQ ID NO: 176) | (SEQ ID NO: 177) |
| B009 | CCAUUUAUUAAUAUGGUGACUUinvdT | AAGUCACCAUAUUAAUAAAdTdT |
| | (SEQ ID NO: 178) | (SEQ ID NO: 179) |
| B010 | CCAUAUUAAUAUGGUGACUUUUinvdT | AAAAGUCACCAUAUUAAUAdTdT |
| | (SEQ ID NO: 180) | (SEQ ID NO: 181) |
| B011 | CCAAUUAAUAUGGUGACUUUUUinvdT | AAAAAGUCACCAUAUUAAUdTdT |
| | (SEQ ID NO: 182) | (SEQ ID NO: 183) |
| B012 | CCAUUAAUAUGGUGACUUUUUAinvdT | UAAAAAGUCACCAUAUUAAdTdT |
| | (SEQ ID NO: 184) | (SEQ ID NO: 185) |
| B013 | CCAUAAUAUGGUGACUUUUUAAinvdT | UUAAAAAGUCACCAUAUUAdTdT |
| | (SEQ ID NO: 186) | (SEQ ID NO: 187) |
| B014 | CCAUAUGGUGACUUUUUAAAAUinvdT | AUUUUAAAAAGUCACCAUAdTdT |
| | (SEQ ID NO: 188) | (SEQ ID NO: 189) |
| C001 | CCAGGCUCUGGUGGCGUGAUCUinvdT | AGAUCACGCCACCAGAGCCdTdT |
| | (SEQ ID NO: 190) | (SEQ ID NO: 191) |
| C002 | CCAGCUCUGGUGGCGUGAUCUGinvdT | CAGAUCACGCCACCAGAGCdTdT |
| | (SEQ ID NO: 192) | (SEQ ID NO: 193) |
| C003 | CCACUCUGGUGGCGUGAUCUGCinvdT | GCAGAUCACGCCACCAGAGdTdT |
| | (SEQ ID NO: 194) | (SEQ ID NO: 195) |
| C004 | CCAUCUGGUGGCGUGAUCUGCGinvdT | CGCAGAUCACGCCACCAGAdTdT |
| | (SEQ ID NO: 196) | (SEQ ID NO: 197) |
| C005 | CCACAGGCGUCAAGCACCCACAinvdT | UGUGGGUGCUUGACGCCUGdTdT |
| | (SEQ ID NO: 198) | (SEQ ID NO: 199) |
| C006 | CCAAGGCGUCAAGCACCCACACinvdT | GUGUGGGUGCUUGACGCCUdTdT |
| | (SEQ ID NO: 200) | (SEQ ID NO: 201) |
| C007 | CCACGUCAAGCACCCACACCCUinvdT | AGGGUGUGGGUGCUUGACGdTdT |
| | (SEQ ID NO: 202) | (SEQ ID NO: 203) |
| C008 | CCAGUCAAGCACCCACACCCUAinvdT | UAGGGUGUGGGUGCUUGACdTdT |
| | (SEQ ID NO: 204) | (SEQ ID NO: 205) |
| C009 | CCAUCAAGCACCCACACCCUAGinvdT | CUAGGGUGUGGGUGCUUGAdTdT |
| | (SEQ ID NO: 206) | (SEQ ID NO: 207) |
| C010 | CCACAAGCACCCACACCCUAGAinvdT | UCUAGGGUGUGGGUGCUUGdTdT |
| | (SEQ ID NO: 208) | (SEQ ID NO: 209) |
| C011 | CCAAAGCACCCACACCCUAGAAinvdT | UUCUAGGGUGUGGGUGCUUdTdT |
| | (SEQ ID NO: 210) | (SEQ ID NO: 211) |
| C012 | CCAAGCACCCACACCCUAGAAGinvdT | CUUCUAGGGUGUGGGUGCUdTdT |
| | (SEQ ID NO: 212) | (SEQ ID NO: 213) |
| C013 | CCAGCACCCACACCCUAGAAGGinvdT | CCUUCUAGGGUGUGGGUGCdTdT |
| | (SEQ ID NO: 214) | (SEQ ID NO: 215) |
| C014 | CCACACCCACACCCUAGAAGGUinvdT | ACCUUCUAGGGUGUGGGUGdTdT |
| | (SEQ ID NO: 216) | (SEQ ID NO: 217) |
| C015 | CCAACCCACACCCUAGAAGGUUinvdT | AACCUUCUAGGGUGUGGGUdTdT |
| | (SEQ ID NO: 218) | (SEQ ID NO: 219) |
| C016 | CCACCCACACCCUAGAAGGUUUinvdT | AAACCUUCUAGGGUGUGGGdTdT |
| | (SEQ ID NO: 220) | (SEQ ID NO: 221) |
| C017 | CCACCACACCCUAGAAGGUUUCinvdT | GAAACCUUCUAGGGUGUGGdTdT |
| | (SEQ ID NO: 222) | (SEQ ID NO: 223) |
| C018 | CCACACACCCUAGAAGGUUUCCinvdT | GGAAACCUUCUAGGGUGUGdTdT |
| | (SEQ ID NO: 224) | (SEQ ID NO: 225) |
| C019 | CCAACACCCUAGAAGGUUUCCGinvdT | CGGAAACCUUCUAGGGUGUdTdT |
| | (SEQ ID NO: 226) | (SEQ ID NO: 227) |
| C020 | CCACACCCUAGAAGGUUUCCGCinvdT | GCGGAAACCUUCUAGGGUGdTdT |
| | (SEQ ID NO: 228) | (SEQ ID NO: 229) |
| C021 | CCAACCCUAGAAGGUUUCCGCAinvdT | UGCGGAAACCUUCUAGGGUdTdT |
| | (SEQ ID NO: 230) | (SEQ ID NO: 231) |
| C022 | CCACCCUAGAAGGUUUCCGCAGinvdT | CUGCGGAAACCUUCUAGGGdTdT |
| | (SEQ ID NO: 232) | (SEQ ID NO: 233) |
| C023 | CCACCUAGAAGGUUUCCGCAGCinvdT | GCUGCGGAAACCUUCUAGGdTdT |
| | (SEQ ID NO: 234) | (SEQ ID NO: 235) |
| C024 | CCACUAGAAGGUUUCCGCAGCGinvdT | CGCUGCGGAAACCUUCUAGdTdT |
| | (SEQ ID NO: 236) | (SEQ ID NO: 237) |
| C025 | CCAUAGAAGGUUUCCGCAGCGAinvdT | UCGCUGCGGAAACCUUCUAdTdT |
| | (SEQ ID NO: 238) | (SEQ ID NO: 239) |
| C026 | CCAAGAAGGUUUCCGCAGCGACinvdT | GUCGCUGCGGAAACCUUCUdTdT |
| | (SEQ ID NO: 240) | (SEQ ID NO: 241) |
| C027 | CCAGAAGGUUUCCGCAGCGACGinvdT | CGUCGCUGCGGAAACCUUCdTdT |
| | (SEQ ID NO: 242) | (SEQ ID NO: 243) |
| C028 | CCAAAGGUUUCCGCAGCGACGUinvdT | ACGUCGCUGCGGAAACCUUdTdT |
| | (SEQ ID NO: 244) | (SEQ ID NO: 245) |
| C029 | CCAAGGUUUCCGCAGCGACGUCinvdT | GACGUCGCUGCGGAAACCUdTdT |
| | (SEQ ID NO: 246) | (SEQ ID NO: 247) |
| C030 | CCAGUUUCCGCAGCGACGUCGAinvdT | UCGACGUCGCUGCGGAAACdTdT |
| | (SEQ ID NO: 248) | (SEQ ID NO: 249) |
| C031 | CCAUUUCCGCAGCGACGUCGAGinvdT | CUCGACGUCGCUGCGGAAAdTdT |
| | (SEQ ID NO: 250) | (SEQ ID NO: 251) |
| C032 | CCACCUGAACUUCAGCUCCUGCinvdT | GCAGGAGCUGAAGUUCAGGdTdT |
| | (SEQ ID NO: 252) | (SEQ ID NO: 253) |
| C033 | CCACUGAACUUCAGCUCCUGCAinvdT | UGCAGGAGCUGAAGUUCAGdTdT |
| | (SEQ ID NO: 254) | (SEQ ID NO: 255) |
| C034 | CCAUGAACUUCAGCUCCUGCACinvdT | GUGCAGGAGCUGAAGUUCAdTdT |
| | (SEQ ID NO: 256) | (SEQ ID NO: 257) |
| C035 | CCAGGACAGCAACCUCUCCCCUinvdT | AGGGGAGAGGUUGCUGUCCdTdT |
| | (SEQ ID NO: 258) | (SEQ ID NO: 259) |
| C036 | CCAGACAGCAACCUCUCCCCUGinvdT | CAGGGGAGAGGUUGCUGUCdTdT |
| | (SEQ ID NO: 260) | (SEQ ID NO: 261) |
| C037 | CCAACAGCAACCUCUCCCCUGGinvdT | CCAGGGGAGAGGUUGCUGUdTdT |
| | (SEQ ID NO: 262) | (SEQ ID NO: 263) |
| C038 | CCAAUGGGCACCGUCAGCUCCAinvdT | UGGAGCUGACGGUGCCCAUdTdT |
| | (SEQ ID NO: 264) | (SEQ ID NO: 265) |
| C039 | CCAGGAUGAAUACCAGCCCCCCinvdT | GGGGGGCUGGUAUUCAUCCdTdT |
| | (SEQ ID NO: 266) | (SEQ ID NO: 267) |
| C040 | CCAGAUGAAUACCAGCCCCCCGinvdT | CGGGGGGCUGGUAUUCAUCdTdT |
| | (SEQ ID NO: 268) | (SEQ ID NO: 269) |
| C041 | CCAAUGAAUACCAGCCCCCCGAinvdT | UCGGGGGGCUGGUAUUCAUdTdT |
| | (SEQ ID NO: 270) | (SEQ ID NO: 271) |
| C042 | CCACAAGGGGGCAAGCUGGUCUinvdT | AGACCAGCUUGCCCCCUUGdTdT |
| | (SEQ ID NO: 272) | (SEQ ID NO: 273) |
| C043 | CCAAAGGGGGCAAGCUGGUCUGinvdT | CAGACCAGCUUGCCCCCUUdTdT |
| | (SEQ ID NO: 274) | (SEQ ID NO: 275) |
| C044 | CCAUGGACCCUGACUGGCUGCAinvdT | UGCAGCCAGUCAGGGUCCAdTdT |
| | (SEQ ID NO: 276) | (SEQ ID NO: 277) |
| C045 | CCAGACCCUGACUGGCUGCAGUinvdT | ACUGCAGCCAGUCAGGGUCdTdT |
| | (SEQ ID NO: 278) | (SEQ ID NO: 279) |
| C046 | CCAUGACUGGCUGCAGUGCCCUinvdT | AGGGCACUGCAGCCAGUCAdTdT |
| | (SEQ ID NO: 280) | (SEQ ID NO: 281) |
| C047 | CCAUCUUCCCAUGGAUAGGGGAinvdT | UCCCCUAUCCAUGGGAAGAdTdT |
| | (SEQ ID NO: 282) | (SEQ ID NO: 283) |
| C048 | CCACUUCCCAUGGAUAGGGGAGinvdT | CUCCCCUAUCCAUGGGAAGdTdT |
| | (SEQ ID NO: 284) | (SEQ ID NO: 285) |
| C049 | CCAUUCCCAUGGAUAGGGGAGGinvdT | CCUCCCCUAUCCAUGGGAAdTdT |
| | (SEQ ID NO: 286) | (SEQ ID NO: 287) |
| C050 | CCAGUAGGGGCUGCAGGGACAAinvdT | UUGUCCCUGCAGCCCCUACdTdT |
| | (SEQ ID NO: 288) | (SEQ ID NO: 289) |
| C051 | CCAGAGUGUGAAAGGUGCUGAUinvdT | AUCAGCACCUUUCACACUCdTdT |
| | (SEQ ID NO: 290) | (SEQ ID NO: 291) |
| C052 | CCAAGUGUGAAAGGUGCUGAUGinvdT | CAUCAGCACCUUUCACACUdTdT |
| | (SEQ ID NO: 292) | (SEQ ID NO: 293) |
| C053 | CCAGUGUGAAAGGUGCUGAUGGinvdT | CCAUCAGCACCUUUCACACdTdT |
| | (SEQ ID NO: 294) | (SEQ ID NO: 295) |
| C054 | CCAUGUGAAAGGUGCUGAUGGCinvdT | GCCAUCAGCACCUUUCACAdTdT |
| | (SEQ ID NO: 296) | (SEQ ID NO: 297) |
| C055 | CCAGUGAAAGGUGCUGAUGGCCinvdT | GGCCAUCAGCACCUUUCACdTdT |
| | (SEQ ID NO: 298) | (SEQ ID NO: 299) |
| C056 | CCAGCUGUGCCUUGGUUUCCUGinvdT | CAGGAAACCAAGGCACAGCdTdT |
| | (SEQ ID NO: 300) | (SEQ ID NO: 301) |
| C057 | CCAUGUGCCUUGGUUUCCUGAGinvdT | CUCAGGAAACCAAGGCACAdTdT |
| | (SEQ ID NO: 302) | (SEQ ID NO: 303) |
| C058 | CCAAACACCCAAAGGUGGCCUGinvdT | CAGGCCACCUUUGGGUGUUdTdT |
| | (SEQ ID NO: 304) | (SEQ ID NO: 305) |
| C059 | CCAACACCCAAAGGUGGCCUGCinvdT | GCAGGCCACCUUUGGGUGUdTdT |
| | (SEQ ID NO: 306) | (SEQ ID NO: 307) |
| C060 | CCAGAAGAAACCUGGAACCAGAinvdT | UCUGGUUCCAGGUUUCUUCdTdT |
| | (SEQ ID NO: 308) | (SEQ ID NO: 309) |
| C209.016 | CCAUUAUUAAUAUGGUGACUUUinvdT | AAAGUCACCAUAUUAAUAAdTdT |
| | (SEQ ID NO: 322) | (SEQ ID NO: 323) |
| C217.013 | CCAAUAUGGUGACUUUUUAAAAinvdT | UUUUAAAAAGUCACCAUAUdtdt |
| | (SEQ ID NO: 324) | (SEQ ID NO: 325) |
| C218.003 | CCAAUUUUUAUUAAUAUGGUGACUin | AGUCACCAUAUUAAUAAAAAUdT |
| | vdT (SEQ ID NO: 326) | dT (SEQ ID NO: 327) |
| C218.005 | CCAUUUUAUUAAUAUGGUGACUUUin | AAAGUCACCAUAUUAAUAAAAdT |
| | vdT (SEQ ID NO: 328) | dT (SEQ ID NO: 329) |
| C218.006 | CCAUUUAUUAAUAUGGUGACUUUUin | AAAAGUCACCAUAUUAAUAAAdT |
| | vdT (SEQ ID NO: 330) | dT (SEQ ID NO: 331) |
| C218.008 | CCAUAUUAAUAUGGUGACUUUUUAin | UAAAAAGUCACCAUAUUAAUAdT |
| | vdT (SEQ ID NO: 332) | dT (SEQ ID NO: 333) |
| C218.012 | CCAAAUAUGGUGACUUUUUAAAAUin | AUUUUAAAAAGUCACCAUAUUdT |
| | vdT (SEQ ID NO: 334) | dT (SEQ ID NO: 335) |
| C219.001 | CCAGCAUUUUUAUUAAUAUGGUGAC | AGUCACCAUAUUAAUAAAAAUG |
| | UmvdT (SEQ ID NO: 336) | CdTdT (SEQ ID NO: 337) |
| C219.003 | CCAAUUUUUAUUAAUAUGGUGACUU | AAAGUCACCAUAUUAAUAAAAA |
| | UmvdT (SEQ ID NO: 338) | UdTdT (SEQ ID NO: 339) |
| C219.004 | CCAUUUUUAUUAAUAUGGUGACUUU | AAAAGUCACCAUAUUAAUAAAA |
| | UmvdT (SEQ ID NO: 340) | AdTdT (SEQ ID NO: 341) |
| C219.006 | CCAUUUAUUAAUAUGGUGACUUUUU | UAAAAAGUCACCAUAUUAAUAA |
| | AtnvdT (SEQ ID NO: 342) | AdTdT (SEQ ID NO: 343) |
| C219.007 | CCAUUAUUAAUAUGGUGACUUUUUA | UUAAAAAGUCACCAUAUUAAUA |
| | AtnvdT (SEQ ID NO: 344) | AdTdT (SEQ ID NO: 345) |
| C209.001 | CCACAGGACAGCAACCUCUCCCinvdT | GGGAGAGGUUGCUGUCCUGdTdT |
| | (SEQ ID NO: 392) | (SEQ ID NO: 393) |
| C209.002 | CCAAGGACAGCAACCUCUCCCCinvdT | GGGGAGAGGUUGCUGUCCUdTdT |
| | (SEQ ID NO: 394) | (SEQ ID NO: 395) |
| C209.003 | CCAUGCCACUGCUGCUGCUGCUinvdT | AGCAGCAGCAGCAGUGGCAdTdT |
| | (SEQ ID NO: 396) | (SEQ ID NO: 397) |
| C209.004 | CCACACUGCUGCUGCUGCUGCUinvdT | AGCAGCAGCAGCAGCAGUGdTdT |
| | (SEQ ID NO: 398) | (SEQ ID NO: 399) |
| C209.005 | CCAUGCUGCUGCUGCUGCUCCUinvdT | AGGAGCAGCAGCAGCAGCAdTdT |
| | (SEQ ID NO: 400) | (SEQ ID NO: 401) |
| C209.006 | CCAACCCUGACUGGCUGCAGUGinvdT | CACUGCAGCCAGUCAGGGUdTdT |
| | (SEQ ID NO: 402) | (SEQ ID NO: 403) |
| C209.007 | CCAUGAAAGGUGCUGAUGGCCCinvdT | GGGCCAUCAGCACCUUUCAdTdT |
| | (SEQ ID NO: 404) | (SEQ ID NO: 405) |
| C209.008 | CCAGGCUGUGCCUUGGUUUCCUinvdT | AGGAAACCAAGGCACAGCCdTdT |
| | (SEQ ID NO: 406) | (SEQ ID NO: 407) |
| C209.009 | CCACUGUGCCUUGGUUUCCUGAinvdT | UCAGGAAACCAAGGCACAGdTdT |
| | (SEQ ID NO: 408) | (SEQ ID NO: 409) |
| C209.010 | CCAGGAAGAAACCUGGAACCAGinvdT | CUGGUUCCAGGUUUCUUCCdTdT |
| | (SEQ ID NO: 410) | (SEQ ID NO: 411) |
| C209.011 | CCAAAGAAACCUGGAACCAGAGinvdT | CUCUGGUUCCAGGUUUCUUdTdT |
| | (SEQ ID NO: 412) | (SEQ ID NO: 413) |
| C209.012 | CCAAGAAACCUGGAACCAGAGGinvdT | CCUCUGGUUCCAGGUUUCUdTdT |
| | (SEQ ID NO: 414) | (SEQ ID NO: 415) |
| C209.013 | CCAAACCUGGAACCAGAGGGGGinvdT | CCCCCUCUGGUUCCAGGUUdTdT |
| | (SEQ ID NO: 416) | (SEQ ID NO: 417) |
| C209.014 | CCACAUUUUUAUUAAUAUGGUGinvdT | CACCAUAUUAAUAAAAAUGdTdT |
| | (SEQ ID NO: 418) | (SEQ ID NO: 419) |
| C209.015 | CCAAUUUUUAUUAAUAUGGUGAinvdT | UCACCAUAUUAAUAAAAAUdTdT |
| | (SEQ ID NO: 420) | (SEQ ID NO: 421) |
| C209.017 | CCAAAUAUGGUGACUUUUUAAAinvdT | UUUAAAAAGUCACCAUAUUdTdT |
| | (SEQ ID NO: 422) | (SEQ ID NO: 423) |
| C209.018 | CCAAUAUGGUGACUUUUUAAAAinvdT | UUUUAAAAAGUCACCAUAUdTdT |
| | (SEQ ID NO: 424) | (SEQ ID NO: 425) |
| C209.019 | CCAAUGGUGACUUUUUAAAAUAinvdT | UAUUUUAAAAAGUCACCAUdTdT |
| | (SEQ ID NO: 426) | (SEQ ID NO: 427) |
| C209.020 | CCAUGGUGACUUUUUAAAAUAAinvdT | UUAUUUUAAAAAGUCACCAdTdT |
| | (SEQ ID NO: 428) | (SEQ ID NO: 429) |
| C209.021 | CCAGGUGACUUUUUAAAAUAAAinvdT | UUUAUUUUAAAAAGUCACCdTdT |
| | (SEQ ID NO: 430) | (SEQ ID NO: 431) |
| C209.022 | CCAGUGACUUUUUAAAAUAAAAinvdT | UUUUAUUUUAAAAAGUCACdTdT |
| | (SEQ ID NO: 432) | (SEQ ID NO: 433) |
| C209.023 | CCAUGACUUUUUAAAAUAAAAAinvdT | UUUUUAUUUUAAAAAGUCAdTdT |
| | (SEQ ID NO: 434) | (SEQ ID NO: 435) |
| C209.024 | CCAGACUUUUUAAAAUAAAAACinvdT | GUUUUUAUUUUAAAAAGUCdTdT |
| | (SEQ ID NO: 436) | (SEQ ID NO: 437) |
| C209.025 | CCAACUUUUUAAAAUAAAAACAinvdT | UGUUUUUAUUUUAAAAAGUdTdT |
| | (SEQ ID NO: 438) | (SEQ ID NO: 439) |
| C209.026 | CCACUUUUUAAAAUAAAAACAAinvdT | UUGUUUUUAUUUUAAAAAGdTdT |
| | (SEQ ID NO: 440) | (SEQ ID NO: 441) |
| C209.027 | CCAUUUUUAAAAUAAAAACAAAinvdT | UUUGUUUUUAUUUUAAAAAdTdT |
| | (SEQ ID NO: 442) | (SEQ ID NO: 443) |
| C209.028 | CCAUUUUAAAAUAAAAACAAACinvdT | GUUUGUUUUUAUUUUAAAAdTdT |
| | (SEQ ID NO: 444) | (SEQ ID NO: 445) |
| C209.029 | CCAUUUAAAAUAAAAACAAACAinvdT | UGUUUGUUUUUAUUUUAAAdTdT |
| | (SEQ ID NO: 446) | (SEQ ID NO: 447) |
| C217.002 | CCACAUUUUUAUUAAUAUGGUGinvdT | CACCAUAUUAAUAAAAAUGdTdT |
| | (SEQ ID NO: 448) | (SEQ ID NO: 449) |
| C217.003 | CCAAUUUUUAUUAAUAUGGUGAinvdT | UCACCAUAUUAAUAAAAAUdTdT |
| | (SEQ ID NO: 450) | (SEQ ID NO: 451) |
| C217.004 | CCAUUUUUAUUAAUAUGGUGACinvdT | GUCACCAUAUUAAUAAAAAdTdT |
| | (SEQ ID NO: 452) | (SEQ ID NO: 453) |
| C217.006 | CCAUUUAUUAAUAUGGUGACUUinvdT | AAGUCACCAUAUUAAUAAAdTdT |
| | (SEQ ID NO: 454) | (SEQ ID NO: 455) |
| C217.007 | CCAUUAUUAAUAUGGUGACUUUinvdT | AAAGUCACCAUAUUAAUAAdTdT |
| | (SEQ ID NO: 456) | (SEQ ID NO: 457) |
| C217.012 | CCAAAUAUGGUGACUUUUUAAAinvdT | UUUAAAAAGUCACCAUAUUdTdT |
| | (SEQ ID NO: 458) | (SEQ ID NO: 459) |
| C218.001 | CCAGCAUUUUUAUUAAUAUGGUGAin | UCACCAUAUUAAUAAAAAUGCdT |
| | vdT (SEQ ID NO: 460) | dT (SEQ ID NO: 461) |
| C218.002 | CCACAUUUUUAUUAAUAUGGUGACin | GUCACCAUAUUAAUAAAAAUGdT |
| | vdT (SEQ ID NO: 462) | dT (SEQ ID NO: 463) |
| C218.004 | CCAUUUUUAUUAAUAUGGUGACUUin | AAGUCACCAUAUUAAUAAAAAdT |
| | vdT (SEQ ID NO: 464) | dT (SEQ ID NO: 465) |
| C218.007 | CCAUUAUUAAUAUGGUGACUUUUUin | AAAAAGUCACCAUAUUAAUAAdT |
| | vdT (SEQ ID NO: 466) | dT (SEQ ID NO: 467) |
| C218.009 | CCAAUUAAUAUGGUGACUUUUUAAin | UUAAAAAGUCACCAUAUUAAUdT |
| | vdT (SEQ ID NO: 468) | dT (SEQ ID NO: 469) |
| C218.010 | CCAUUAAUAUGGUGACUUUUUAAAin | UUUAAAAAGUCACCAUAUUAAdT |
| | vdT (SEQ ID NO: 470) | dT (SEQ ID NO: 471) |
| C218.011 | CCAUAAUAUGGUGACUUUUUAAAAin | UUUUAAAAAGUCACCAUAUUAdT |
| | vdT (SEQ ID NO: 472) | dT (SEQ ID NO: 473) |
| C219.002 | CCACAUUUUUAUUAAUAUGGUGACU | AAGUCACCAUAUUAAUAAAAAU |
| | UmvdT (SEQ ID NO: 474) | GdTdT (SEQ ID NO: 475) |
| C219.005 | CCAUUUUAUUAAUAUGGUGACUUUU | AAAAAGUCACCAUAUUAAUAAA |
| | UmvdT (SEQ ID NO: 476) | AdTdT (SEQ ID NO: 477) |
| C219.008 | CCAUAUUAAUAUGGUGACUUUUUAA | UUUAAAAAGUCACCAUAUUAAU |
| | AncivdT (SEQ ID NO: 478) | AdTdT (SEQ ID NO: 479) |
| C219.009 | CCAAUUAAUAUGGUGACUUUUUAAA | UUUUAAAAAGUCACCAUAUUAA |
| | AncivdT (SEQ ID NO: 480) | UdTdT (SEQ ID NO: 481) |
| C219.010 | CCAUUAAUAUGGUGACUUUUUAAAA | AUUUUAAAAAGUCACCAUAUUA |
| | UmvdT (SEQ ID NO: 482) | AdTdT (SEQ ID NO: 483) |

invdX = inverted dX nucleotide

[0140] In some embodiments, the dsRNA comprises one or more modified nucleotides described in PCT Publication WO 2019/170731, the disclosure of which is incorporated herein in its entirety. In such modified nucleotides, the ribose ring has been replaced by a six-membered heterocyclic ring. Such a modified nucleotide has the structure of formula (I):

[chemical structure]

wherein:
[0141] B is a heterocyclic nucleobase;
[0142] one of L1 and L2 is an internucleoside linking group linking the compound of formula (I) to a polynucleotide and the other of L1 and L2 is H, a protecting group, a phosphorus moiety or an internucleoside linking group linking the compound of formula (I) to a polynucleotide,
[0143] Y is O, NH, NR1 or N—C(═O)—R1, wherein R1 is:
   [0144] a (C1-C20) alkyl group, optionally substituted by one or more groups selected from an halogen atom, a (C1-C6) alkyl group, a (C3-C8) cycloalkyl group, a (C3-C14) heterocycle, a (C6-C14) aryl group, a (C5-C14) heteroaryl group, —O—Z1, —N(Z1)(Z2), —S—Z1, —CN, —C(=J)-O—Z1, —O—C(=J)-Z1, —C(=J)-N(Z1)(Z2), and —N(Z1)-C(=J)-Z2, wherein
      [0145] J is O or S,
      [0146] each of Z1 and Z2 is, independently, H, a (C1-C6) alkyl group, optionally substituted by one or more groups selected from a halogen atom and a (C1-C6) alkyl group,
   [0147] a (C3-C8) cycloalkyl group, optionally substituted by one or more groups selected from a halogen atom and a (C1-C6) alkyl group,
   [0148] a group —[C(═O)]m-R2-(O—CH2-CH2)p-R3, wherein
      [0149] m is an integer meaning 0 or 1,
      [0150] p is an integer ranging from 0 to 10,
      [0151] R2 is a (C1-C20) alkylene group optionally substituted by a (C1-C6) alkyl group, —O—Z3, —N(Z3)(Z4), —S—Z3, —CN, —C(═K)—O—Z3, —O—C(═K)—Z3, —C(═K)—N(Z3)(Z4), or —N(Z3)-C(═K)—Z4, wherein
         [0152] K is O or S,
         [0153] each of Z3 and Z4 is, independently, H, a (C1-C6) alkyl group, optionally substituted by one or more groups selected from a halogen atom and a (C1-C6) alkyl group, and
      [0154] R3 is selected from the group consisting of a hydrogen atom, a (C1-C6) alkyl group, a (C1-C6) alkoxy group, a (C3-C8) cycloalkyl group, a (C3-C14) heterocycle, a (C6-C14) aryl group or a (C5-C14) heteroaryl group, or R3 is a cell targeting moiety,
[0155] X1 and X2 are each, independently, a hydrogen atom, a (C1-C6) alkyl group, and
[0156] each of Ra, Rb, Rc and Rd is, independently, H or a (C1-C6) alkyl group,
   or is a pharmaceutically acceptable salt thereof.

[0157] In some embodiments, Y is NR1, R1 is a non-substituted (C1-C20) alkyl group, and L1, L2, Ra, Rb, Rc, Rd, X1, X2, R2, R3 and B have the same meaning as defined for the general formula (I), or a pharmaceutically acceptable salt thereof.

[0158] In some embodiments, Y is NR1, R1 is a non-substituted (C1-C16) alkyl group, which includes an alkyl group selected from a group comprising methyl, isopropyl, butyl, octyl, hexadecyl, and L1, L2, Ra, Rb, Rc, Rd, X1, X2, R2, R3 and B have the same meaning as defined for the general formula (I), or a pharmaceutically acceptable salt thereof.

[0159] In some embodiments, Y is NR1, R1 is a (C3-C8) cycloalkyl group, optionally substituted by one or more groups selected from a halogen atom and a (C1-C6) alkyl group, and L1, L2, Ra, Rb, Rc, Rd, X1, X2, R2, R3 and B have the same meaning as defined for the general formula (I), or a pharmaceutically acceptable salt thereof.

[0160] In some embodiments, Y is NR1, R1 is a cyclohexyl group, and L1, L2, Ra, Rb, Rc, Rd, X1, X2, R2, R3 and B have the same meaning as defined for the general formula (I), or a pharmaceutically acceptable salt thereof.

[0161] In some embodiments, Y is NR1, R1 is a (C1-C20) alkyl group substituted by a (C6-C14) aryl group and L1, L2, Ra, Rb, Rc, Rd, X1, X2, R2, R3 and B have the same meaning as defined for the general formula (I), or a pharmaceutically acceptable salt thereof.

[0162] In some embodiments, Y is NR1, R1 is a methyl group substituted by a phenyl group, and L1, L2, Ra, Rb, Rc, Rd, X1, X2, R2, R3 and B have the same meaning as defined for the general formula (I), or a pharmaceutically acceptable salt thereof.

[0163] In some embodiments, Y is N—C(═O)—R1, R1 is an optionally substituted (C1-C20) alkyl group, and L1, L2, Ra, Rb, Rc, Rd, X1, X2, R2, R3 and B have the same meaning as defined for the general formula (I), or a pharmaceutically acceptable salt thereof.

[0164] In some embodiments, Y is N—C(═O)—R1, R1 is selected from a group comprising methyl and pentadecyl and L1, L2, Ra, Rb, Rc, Rd, X1, X2, R2, R3 and B have the same meaning as defined for the general formula (I), or a pharmaceutically acceptable salt thereof.

[0165] In some embodiments, the dsRNA comprises one or more compounds of formula (I) wherein Y is

a) NR1, wherein R1 is a non-substituted (C1-C20) alkyl group;
b) NR1, wherein R1 is a non-substituted (C1-C16) alkyl group, which includes an alkyl group selected from a group comprising methyl, isopropyl, butyl, octyl, and hexadecyl;
c) NR1, wherein R1 is a (C3-C8) cycloalkyl group, optionally substituted by one or more groups selected from a halogen atom and a (C1-C6) alkyl group;
d) NR1, wherein R1 is a cyclohexyl group;
e) NR1, wherein R1 is a (C1-C20) alkyl group substituted by a (C6-C14) aryl group;
f) NR1, wherein R1 is a methyl group substituted by a phenyl group;
g) N—C(═O)—R1, wherein R1 is an optionally substituted (C1-C20) alkyl group; or
h) N—C(═O)—R1, wherein R1 is methyl or pentadecyl.

[0166] In some embodiments, B is selected from a group comprising a pyrimidine, a substituted pyrimidine, a purine and a substituted purine, or a pharmaceutically acceptable salt thereof.

[0167] In some embodiments, the internucleoside linking group in the dsRNA is independently selected from the group consisting of phosphodiester, phosphotriester, phosphorothioate, phosphorodithioate, alkyl-phosphonate and phosphoramidate backbone linking groups, or a pharmaceutically acceptable salt thereof. In some embodiments, the dsRNA comprises one or more internucleoside linking groups independently selected from the group consisting of phosphodiester, phosphotriester, phosphorothioate, phosphorodithioate, alkyl-phosphonate and phosphoramidate backbone linking groups, or a pharmaceutically acceptable salt thereof.

[0168] In some embodiments, the dsRNA comprises from 2 to 10 compounds of formula (I), or a pharmaceutically acceptable salt thereof. In an embodiment, the 2 to 10 compounds of formula (I) are on the sense strand.

[0169] In further embodiments, the dsRNA comprises one or more targeted nucleotides or a pharmaceutically acceptable salt thereof.

[0170] In some embodiments, R3 is of the formula (II):

[chemical structure]

wherein A1, A2 and A3 are OH,
A4 is OH or NHC(═O)—R5, wherein R5 is a (C1-C6) alkyl group, optionally substituted by a halogen atom. or a pharmaceutically acceptable salt thereof

[0171] In some embodiments, R3 is N-acetyl-galactosamine, or a pharmaceutically acceptable salt thereof

[0172] The precursors that can be used to make modified siRNAs having nucleotides of formula (I) are exemplified in Table A below. Table A shows examples of phosphoramidite nucleotide analogs for oligonucleotide synthesis. In the (2S,6R) diastereomeric series, the phosphoramidites as nucleotide precursors are abbreviated with a “pre-l”, the nucleotide analogs are abbreviated with an “l”, followed by the nucleobase and a number, which specifies the group Y in formula (I). To distinguish both stereochemistries, the analogues (2R,6R)-diastereoisomers are indicated with an additional “b.” Targeted nucleotide precursors, targeted nucleotide analogs and solid supports are abbreviated as described above, but with an “lg” instead of the “l.”

TABLE A

| | | | Name in | |
|---|---|---|---|---|
| | | Precursor | oligo- | Stereo- |
| No | Structure | name | sequence | chemistry |
| 1 | [chemical structure] | pre-1T3 | 1T3 | (2S,6R) |
| 2 | [chemical structure] | pre-1U3 | 1U3 | (2S,6R) |
| 3 | [chemical structure] | pre-1G3 | 1G3 | (2S,6R) |
| 4 | [chemical structure] | pre-1A3 | 1A3 | (2S,6R) |
| 5 | [chemical structure] | pre-1C3 | 1C3 | (2S,6R) |
| 6 | [chemical structure] | pre-1T3b | 1T3b | (2R,6R) |
| 7 | [chemical structure] | pre-1U3b | 1U3b | (2R,6R) |
| 8 | [chemical structure] | pre-1G3b | 1G3b | (2R,6R) |
| 9 | [chemical structure] | pre-1A3b | 1A3b | (2R,6R) |
| 10 | [chemical structure] | pre-1C3b | 1C3b | (2R,6R) |
| 11 | [chemical structure] | pre-1T2 | 1T2 | (2S,6R) |
| 12 | [chemical structure] | pre-1T6 | 1T6 | (2S,6R) |
| 13 | [chemical structure] | pre-1T7 | 1T7 | (2S,6R) |
| 14 | [chemical structure] | pre-1T8 | 1T8 | (2S,6R) |
| 15 | [chemical structure] | pre-1T4 | 1T4 | (2S,6R) |
| 16 | [chemical structure] | pre-1T5 | 1T5 | (2S,6R) |
| 17 | [chemical structure] | pre-1T9 | 1T9 | (2S,6R) |
| 18 | [chemical structure] | pre-1T10 | 1T10 | (2S,6R) |
| 19 | [chemical structure] | pre-1T1 | 1T1 | (2S,6R) |
| 20 | [chemical structure] | pre-1U1 | 1U1 | (2S,6R) |
| 21 | [chemical structure] | pre-1G1 | 1G1 | (2S,6R) |
| 22 | [chemical structure] | pre-1C1 | 1C1 | (2S,6R) |
| 23 | [chemical structure] | pre-1T1b | 1T1b | (2R,6R) |
| 24 | [chemical structure] | pre-1U1b | 1U1b | (2R,6R) |
| 25 | [chemical structure] | pre-1C1b | 1C1b | (2R,6R) |
| 26 | [chemical structure] | pre-1gT9 | 1gT9 | (2S,6R) |
| 27 | [chemical structure] | pre-1gT8 | 1gT8 | (2S,6R) |
| 28 | [chemical structure] | pre-1gT7 | 1gT7 | (2S,6R) |
| 29 | [chemical structure] | pre-1gT6 | 1gT6 | (2S,6R) |
| 30 | [chemical structure] | pre-1gT5 | 1gT5 | (2S,6R) |
| 31 | [chemical structure] | pre-1gT3 | 1gT3 | (2S,6R) |
| 32 | [chemical structure] | pre-1gT4 | 1gT4 | (2S,6R) |
| 33 | [chemical structure] | pre-1gT12 | 1gT12 | (2S,6R) |
| 34 | [chemical structure] | pre-1gT11 | 1gT11 | (2S,6R) |
| 35 | [chemical structure] | pre-1gT10 | 1gT10 | (2S,6R) |
| 36 | [chemical structure] | pre-1gT1 | 1gT1 | (2S,6R) |
| 37 | [chemical structure] | pre-1gT2 | 1gT2 | (2S,6R) |
| 38 | [chemical structure] | pre-1U4 | 1U4 | (2S,6R) |
| 39 | [chemical structure] | pre-1G4 | 1G4 | (2S,6R) |
| 40 | [chemical structure] | pre-1A4 | 1A4 | (2S,6R) |
| 41 | [chemical structure] | pre-1C4 | 1C4 | (2S,6R) |
| 42 | [chemical structure] | pre-1A4b | 1A4b | (2R,6R) |
| 43 | [chemical structure] | pre-1A1 | 1A1 | (2S,6R) |
| 44 | [chemical structure] | pre-1A1b | 1A1b | (2R,6R) |
| 45 | [chemical structure] | pre-1T4b | 1T4b | (2R,6R) |
| 46 | [chemical structure] | pre-1G1b | 1G1b | (2R,6R) |

[0173] The modified nucleotides of formula (I) may be incorporated at the 5′, 3′, or both ends of the sense strand and/or antisense strand of the dsRNA. By way of example, one or more (e.g., 1, 2, 3, 4, or 5 or more) modified nucleotides may be incorporated at the 5′ end of the sense strand of the dsRNA. In some embodiments, one or more (e.g., 1, 2, 3, or more) modified nucleotides are positioned in the 5′ end of the sense strand, where the modified nucleotides do not complement the antisense sequence but may be optionally paired with an equal or smaller number of complementary nucleotides at the corresponding 3′ end of the antisense strand.

[0174] In some embodiments, the dsRNA may comprise a sense strand having a sense sequence of 17, 18, or 19 nucleotides in length, where three to five nucleotides of formula (I) (e.g., three consecutive lgT3 or lgT7 with or without additional nucleotides of formula (I)) are placed in the 5′ end of the sense sequence, making the sense strand 20, 21, or 22 nucleotides in length. In such embodiments, the sense strand may additionally comprise two consecutive nucleotides of formula (I) (e.g., lT4 or lT3) at the 3′ of the sense sequence, making the sense strand 22, 23, or 24 nucleotides in length. The dsRNA may comprise an antisense sequence of 19 nucleotides in length, where the antisense sequence may additionally be linked to 2 modified nucleotides or deoxyribonucleotides (e.g., dT) at its 3′ end, making the antisense strand 21 nucleotides in length. In further embodiments, the sense strand of the dsRNA contains only naturally occurring internucleotide bonds (phosphodiester bond), where the antisense strand may optionally contain non-naturally occurring internucleotide bonds. For example, the antisense strand may contain phosphorothioate bonds in the backbone near or at its 5′ and/or 3′ ends.

[0175] In some embodiments, the use of modified nucleotides of formula (I) circumvents the need for other RNA modifications such as the use of non-naturally occurring internucleotide bonds, thereby simplifying the chemical synthesis of dsRNAs. Moreover, the modified nucleotides of formula (I) can be readily made to contain cell targeted moieties such as GalNAc derivatives (which include GalNAc itself), enhancing the delivery efficiency of dsRNAs incorporating such nucleotides. Further, it has been shown that dsRNAs incorporating modified nucleotides of formula (I), e.g., at the sense strand, significantly improve the stability and therapeutic potency of the dsRNAs.

[0176] In some embodiments, a dsRNA of the present disclosure comprises a sense strand and/or an antisense strand described in double-stranded ribonucleic acid (dsRNA), wherein the dsRNA comprises a sense strand comprising a first sequence and an antisense strand comprising a second sequence, wherein the first sequence and the second sequence are complementary, wherein the first sequence comprises a sequence selected from the group consisting of SEQ ID NOS: 6-11 and 310-321. The siRNAs in table 4 may comprise any one or more of the following modifications: mX=2′-O-methyl-nucleotide, fX=2′-fluoro-nucleotide, lX=locked nucleotide, dT=deoxythymidine, lgT3=lgT3 nucleotide analog, lT4=lT4 nucleotide analog, PO=phosphodiester linkage; and PS=phosphorothioate linkage.

TABLE 4
Optimized PCSK9 GalNAc siRNAs

| | | Sequence antisense strand |
|---|---|---|
| siRNA ID | Sequence sense strand 5′-->3′ | 5′-->3′ |
| C027.001 | lgT3-PO-lgT3-PO-lgT3-PO-fU- | fA-PS4U-PS-mU-PO-fU- |
| | PO-mA-PO-fU-PO-mG-PO-fG- | PO-mU-PO-fA-PO-mA- |
| | PO-mU-PO-fG-PO-mA-PO-fC- | PO-fA-PO-mA-PO-fA-PO- |
| | PO-mU-PO-fU-PO-mU-PO-fU- | mG-PO-fU-PO-mC-PO-fA- |
| | PO-mU-PO-fA-PO-mA-PO-fA- | PO-mC-PO-fC-PO-mA- |
| | PS-mA-PS-fU (SEQ ID NO: 578) | PO4U-PO-mA-PS-dT-PS- |
| | | dT (SEQ ID NO: 589) |
| C027.002 | lgT3-PO-lgT3-PO-lgT3-PO-fG- | fA-PS-fC-PS-mC-PO-fA- |
| | PO-mC-PO-fA-PO-mU-PO-fU- | PO-mU-PO-fA-PO-mU- |
| | PO-mU-PO-fU-PO-mU-PO-fA- | PO4U-PO-mA-PO-fA-PO- |
| | PO-mU-PO-fU-PO-mA-PO-fA- | mU-PO-fA-PO-mA-PO-fA- |
| | PO-mU-PO-fA-PO-mU-PO-fG- | PO-mA-PO-fA-PO-mU- |
| | PS-mG-PS-fU (SEQ ID NO: 599) | PO-fG-PO-mC-PS-dT-PS- |
| | | dT (SEQ ID NO: 610) |
| C027.003 | lgT3-PO-lgT3-PO-lgT3-PO-fU- | fA-PS-fA-PS-mA-PO-fG- |
| | PO-mU-PO-fA-PO-mU-PO-fU- | PO-mU-PO-fC-PO-mA- |
| | PO-mA-PO-fA-PO-mU-PO-fA- | PO-fC-PO-mC-PO-fA-PO- |
| | PO-mU-PO-fG-PO-mG-PO-fU- | mU-PO-fA-PO-mU-PO-fU- |
| | PO-mG-PO-fA-PO-mC-PO-fU- | PO-mA-PO-fA-PO-mU- |
| | PS-mU-PS-fU (SEQ ID NO: 620) | PO-fA-PO-mA-PS-dT-PS- |
| | | dT (SEQ ID NO: 631) |
| C027.001#01 | lgT3-PO-lgT3-PO-lgT3-PO-mU- | mA-PS-fU-PS-mU-PO-fU- |
| | PO-mA-PO-mU-PO-mG-PO-fG- | PO-mU-PO-mA-PO-mA- |
| | PO-mU-PO-fG-PO-fA-PO-fC- | PO-mA-PO-mA-PO-mA- |
| | PO-mU-PO-mU-PO-mU-PO-mU- | PO-mG-PO-mU-PO-mC- |
| | PO-mU-PO-mA-PO-mA-PO-mA- | PO-fA-PO-mC-PO-fC-PO- |
| | PS-mA-PS-mU (SEQ ID NO: 579) | mA-PO-mU-PO-mA-PS- |
| | | mA-PS-mA (SEQ ID |
| | | NO: 590) |
| C027.001#02 | lgT3-PO-lgT3-PO-lgT3-PO-mU- | mA-PS-fU-PS-mU-PO- |
| | PO-mA-PO-mU-PO-mG-PO-fG- | mU-PO-mU-PO-fA-PO- |
| | PO-mU-PO-fG-PO-fA-PO-fC- | mA-PO-mA-PO-mA-PO- |
| | PO-mU-PO-mU-PO-mU-PO-mU- | mA-PO-mG-PO-mU-PO- |
| | PO-mU-PO-mA-PO-mA-PO-mA- | mC-PO-fA-PO-mC-PO-fC- |
| | PS-mA-PS-mU (SEQ ID NO: 579) | PO-mA-PO-mU-PO-mA- |
| | | PS-mA-PS-mA (SEQ ID |
| | | NO: 591) |
| C027.001#03 | lgT3-PO-lgT3-PO-lgT3-PO-mU- | mA-PS-fU-PS-mU-PO-fU- |
| | PO-mA-PO-mU-PO-mG-PO-fG- | PO-mU-PO-mA-PO-mA- |
| | PO-mU-PO-fG-PO-fA-PO-fC- | PO-fA-PO-fA-PO-mA-PO- |
| | PO-mU-PO-mU-PO-mU-PO-mU- | mG-PO-mU-PO-mC-PO- |
| | PO-mU-PO-mA-PO-mA-PO-mA- | fA-PO-mC-PO-fC-PO-mA- |
| | PS-mA-PS-mU (SEQ ID NO: 579) | PO-mU-PO-mA-PS-mA- |
| | | PS-mA (SEQ ID NO: 592) |
| C027.001#04 | lgT3-PO-lgT3-PO-lgT3-PO-mU- | mA-PS-fU-PS-mU-PO-fU- |
| | PO-mA-PO-mU-PO-mG-PO-fG- | PO-mU-PO-mA-PO-mA- |
| | PO-mU-PO-fG-PO-fA-PO-fC- | PO-mA-PO-fA-PO-mA- |
| | PO-mU-PO-mU-PO-mU-PO-mU- | PO-mG-PO-mU-PO-mC- |
| | PO-mU-PO-mA-PO-mA-PO-mA- | PO-fA-PO-mC-PO-fC-PO- |
| | PS-mA-PS-mU (SEQ ID NO: 579) | mA-PO-mU-PO-mA-PS- |
| | | mA-PS-mA (SEQ ID |
| | | NO: 593) |
| C027.001#05 | lgT3-PO-lgT3-PO-lgT3-PO-mU- | fA-PS4U-PS-mU-PO-fU- |
| | PO-mA-PO-mU-PO-mG-PO-fG- | PO-mU-PO-fA-PO-mA- |
| | PO-mU-PO-fG-PO-fA-PO-fC- | PO-fA-PO-mA-PO-fA-PO- |
| | PO-mU-PO-mU-PO-mU-PO-mU- | mG-PO-mU-PO-mC-PO- |
| | PO-mU-PO-mA-PO-mA-PO-mA- | fA-PO-mC-PO-fC-PO-mA- |
| | PS-mA-PS-mU (SEQ ID NO: 579) | PO4U-PO-mA-PS-dT-PS- |
| | | dT (SEQ ID NO: 594) |
| C027.001#06 | lgT3-PO-lgT3-PO-lgT3-PO-lU- | mA-PS-fU-PS-mU-PO-fU- |
| | PO-lA-PO-mU-PO-mG-PO-fG- | PO-mU-PO-mA-PO-mA- |
| | PO-mU-PO-fG-PO-fA-PO-fC- | PO-mA-PO-mA-PO-mA- |
| | PO-mU-PO-mU-PO-mU-PO-mU- | PO-mG-PO-mU-PO-mC- |
| | PO-mU-PO-mA-PO-mA-PO-mA- | PO-fA-PO-mC-PO-fC-PO- |
| | PS-mA-PS-mU (SEQ ID NO: 580) | mA-PO-mU-PO-mA-PS- |
| | | mA-PS-mA (SEQ ID |
| | | NO: 590) |
| C027.001#07 | lgT3-PO-lgT3-PO-lgT3-PO-lU- | mA-PS-fU-PS-mU-PO- |
| | PO-lA-PO-mU-PO-mG-PO-fG- | mU-PO-mU-PO-fA-PO- |
| | PO-mU-PO-fG-PO-fA-PO-fC- | mA-PO-mA-PO-mA-PO- |
| | PO-mU-PO-mU-PO-mU-PO-mU- | mA-PO-mG-PO-mU-PO- |
| | PO-mU-PO-mA-PO-mA-PO-mA- | mC-PO-fA-PO-mC-PO-fC- |
| | PS-mA-PS-mU (SEQ ID NO: 580) | PO-mA-PO-mU-PO-mA- |
| | | PS-mA-PS-mA (SEQ ID |
| | | NO: 591) |
| C027.001#08 | lgT3-PO-lgT3-PO-lgT3-PO-lU- | mA-PS-fU-PS-mU-PO-fU- |
| | PO-lA-PO-mU-PO-mG-PO-fG- | PO-mU-PO-mA-PO-mA- |
| | PO-mU-PO-fG-PO-fA-PO-fC- | PO-fA-PO-fA-PO-mA-PO- |
| | PO-mU-PO-mU-PO-mU-PO-mU- | mG-PO-mU-PO-mC-PO- |
| | PO-mU-PO-mA-PO-mA-PO-mA- | fA-PO-mC-PO-fC-PO-mA- |
| | PS-mA-PS-mU (SEQ ID NO: 580) | PO-mU-PO-mA-PS-mA- |
| | | PS-mA (SEQ ID NO: 592) |
| C027.001#09 | lgT3-PO-lgT3-PO-lgT3-PO-lU- | mA-PS-fU-PS-mU-PO-fU- |
| | PO-lA-PO-mU-PO-mG-PO-fG- | PO-mU-PO-mA-PO-mA- |
| | PO-mU-PO-fG-PO-fA-PO-fC- | PO-mA-PO-fA-PO-mA- |
| | PO-mU-PO-mU-PO-mU-PO-mU- | PO-mG-PO-mU-PO-mC- |
| | PO-mU-PO-mA-PO-mA-PO-mA- | PO-fA-PO-mC-PO-fC-PO- |
| | PS-mA-PS-mU (SEQ ID NO: 580) | mA-PO-mU-PO-mA-PS- |
| | | mA-PS-mA (SEQ ID |
| | | NO: 593) |
| C027.001#10 | lgT3-PO-lgT3-PO-lgT3-PO-lU- | fA-PS4U-PS-mU-PO-fU- |
| | PO-lA-PO-mU-PO-mG-PO-fG- | PO-mU-PO-fA-PO-mA- |
| | PO-mU-PO-fG-PO-fA-PO-fC- | PO-fA-PO-mA-PO-fA-PO- |
| | PO-mU-PO-mU-PO-mU-PO-mU- | mG-PO-mU-PO-mC-PO- |
| | PO-mU-PO-mA-PO-mA-PO-mA- | fA-PO-mC-PO-fC-PO-mA- |
| | PS-mA-PS-mU (SEQ ID NO: 580) | PO4U-PO-mA-PS-dT-PS- |
| | | dT (SEQ ID NO: 594) |
| C027.001#11 | lgT3-PO-lgT3-PO-lgT3-PO-mU- | mA-PS-fU-PS-mU-PO-fU- |
| | PO-mA-PO-mU-PO-mG-PO-fG- | PO-mU-PO-mA-PO-mA- |
| | PO-mU-PO-fG-PO-fA-PO-fC- | PO-mA-PO-mA-PO-mA- |
| | PO-mU-PO-mU-PO-mU-PO-mU- | PO-mG-PO-mU-PO-mC- |
| | PO-mU-PO-mA-PO-mA-PO-mA- | PO-fA-PO-mC-PO-fC-PO- |
| | PO-lT4-PO-lT4 (SEQ ID | mA-PO-mU-PO-mA-PS- |
| | NO: 581) | mA-PS-mA (SEQ ID |
| | | NO: 590) |
| C027.001#12 | lgT3-PO-lgT3-PO-lgT3-PO-mU- | mA-PS-fU-PS-mU-PO- |
| | PO-mA-PO-mU-PO-mG-PO-fG- | mU-PO-mU-PO-fA-PO- |
| | PO-mU-PO-fG-PO-fA-PO-fC- | mA-PO-mA-PO-mA-PO- |
| | PO-mU-PO-mU-PO-mU-PO-mU- | mA-PO-mG-PO-mU-PO- |
| | PO-mU-PO-mA-PO-mA-PO-mA- | mC-PO-fA-PO-mC-PO-fC- |
| | PO-lT4-PO-lT4 (SEQ ID | PO-mA-PO-mU-PO-mA- |
| | NO: 581) | PS-mA-PS-mA (SEQ ID |
| | | NO: 591) |
| C027.001#13 | lgT3-PO-lgT3-PO-lgT3-PO-mU- | mA-PS-fU-PS-mU-PO-fU- |
| | PO-mA-PO-mU-PO-mG-PO-fG- | PO-mU-PO-mA-PO-mA- |
| | PO-mU-PO-fG-PO-fA-PO-fC- | PO-fA-PO-fA-PO-mA-PO- |
| | PO-mU-PO-mU-PO-mU-PO-mU- | mG-PO-mU-PO-mC-PO- |
| | PO-mU-PO-mA-PO-mA-PO-mA- | fA-PO-mC-PO-fC-PO-mA- |
| | PO-lT4-PO-lT4 (SEQ ID | PO-mU-PO-mA-PS-mA- |
| | NO: 581) | PS-mA (SEQ ID NO: 592) |
| C027.001#14 | lgT3-PO-lgT3-PO-lgT3-PO-mU- | mA-PS-fU-PS-mU-PO-fU- |
| | PO-mA-PO-mU-PO-mG-PO-fG- | PO-mU-PO-mA-PO-mA- |
| | PO-mU-PO-fG-PO-fA-PO-fC- | PO-mA-PO-fA-PO-mA- |
| | PO-mU-PO-mU-PO-mU-PO-mU- | PO-mG-PO-mU-PO-mC- |
| | PO-mU-PO-mA-PO-mA-PO-mA- | PO-fA-PO-mC-PO-fC-PO- |
| | PO-lT4-PO-lT4 (SEQ ID | mA-PO-mU-PO-mA-PS- |
| | NO: 581) | mA-PS-mA (SEQ ID |
| | | NO: 593) |
| C027.001#15 | lgT3-PO-lgT3-PO-lgT3-PO-mU- | fA-PS4U-PS-mU-PO-fU- |
| | PO-mA-PO-mU-PO-mG-PO-fG- | PO-mU-PO-fA-PO-mA- |
| | PO-mU-PO-fG-PO-fA-PO-fC- | PO-fA-PO-mA-PO-fA-PO- |
| | PO-mU-PO-mU-PO-mU-PO-mU- | mG-PO-mU-PO-mC-PO- |
| | PO-mU-PO-mA-PO-mA-PO-mA- | fA-PO-mC-PO-fC-PO-mA- |
| | PO-lT4-PO-lT4 (SEQ ID | PO4U-PO-mA-PS-dT-PS- |
| | NO: 581) | dT (SEQ ID NO: 594) |
| C027.001#16 | lgT3-PO-lgT3-PO-lgT3-PO-mU- | mA-PS-fU-PS-mU-PO-fU- |
| | PO-mA-PO-mU-PO-mG-PO-fG- | PO-mU-PO-mA-PO-mA- |
| | PO-mU-PO-fG-PO-fA-PO-fC- | PO-mA-PO-mA-PO-mA- |
| | PO-mU-PO-mU-PO-mU-PO-mU- | PO-mG-PO-mU-PO-mC- |
| | PO-mU-PO-mA-PO-mA-PO-mA- | PO-fA-PO-mC-PO-fC-PO- |
| | PO-lT4-PO-lT4 (SEQ ID | mA-PO-mU-PO-mA-PS- |
| | NO: 581) | lA-PS-lA (SEQ ID |
| | | NO: 595) |
| C027.001#17 | lgT3-PO-lgT3-PO-lgT3-PO-mU- | mA-PS-fU-PS-mU-PO- |
| | PO-mA-PO-mU-PO-mG-PO-fG- | mU-PO-mU-PO-fA-PO- |
| | PO-mU-PO-fG-PO-fA-PO-fC- | mA-PO-mA-PO-mA-PO- |
| | PO-mU-PO-mU-PO-mU-PO-mU- | mA-PO-mG-PO-mU-PO- |
| | PO-mU-PO-mA-PO-mA-PO-mA- | mC-PO-fA-PO-mC-PO-fC- |
| | PO-lT4-PO-lT4 (SEQ ID | PO-mA-PO-mU-PO-mA- |
| | NO: 581) | PS-lA-PS-lA (SEQ ID |
| | | NO: 596) |
| C027.001#18 | lgT3-PO-lgT3-PO-lgT3-PO-mU- | mA-PS-fU-PS-mU-PO-fU- |
| | PO-mA-PO-mU-PO-mG-PO-fG- | PO-mU-PO-mA-PO-mA- |
| | PO-mU-PO-fG-PO-fA-PO-fC- | PO-fA-PO-fA-PO-mA-PO- |
| | PO-mU-PO-mU-PO-mU-PO-mU- | mG-PO-mU-PO-mC-PO- |
| | PO-mU-PO-mA-PO-mA-PO-mA- | fA-PO-mC-PO-fC-PO-mA- |
| | PO-lT4-PO-lT4 (SEQ ID | PO-mU-PO-mA-PS-lA-PS- |
| | NO: 581) | lA (SEQ ID NO: 597) |
| C027.001#19 | lgT3-PO-lgT3-PO-lgT3-PO-mU- | mA-PS-fU-PS-mU-PO-fU- |
| | PO-mA-PO-mU-PO-mG-PO-fG- | PO-mU-PO-mA-PO-mA- |
| | PO-mU-PO-fG-PO-fA-PO-fC- | PO-mA-PO-fA-PO-mA- |
| | PO-mU-PO-mU-PO-mU-PO-mU- | PO-mG-PO-mU-PO-mC- |
| | PO-mU-PO-mA-PO-mA-PO-mA- | PO-fA-PO-mC-PO-fC-PO- |
| | PO-lT4-PO-lT4 (SEQ ID | mA-PO-mU-PO-mA-PS- |
| | NO: 581) | lA-PS-lA (SEQ ID |
| | | NO: 598) |
| C027.001#20 | lgT3-PS-lgT3-PS-lgT3-PO-mU- | mA-PS-fU-PS-mU-PO-fU- |
| | PO-mA-PO-mU-PO-mG-PO-fG- | PO-mU-PO-mA-PO-mA- |
| | PO-mU-PO-fG-PO-fA-PO-fC- | PO-mA-PO-mA-PO-mA- |
| | PO-mU-PO-mU-PO-mU-PO-mU- | PO-mG-PO-mU-PO-mC- |
| | PO-mU-PO-mA-PO-mA-PO-mA- | PO-fA-PO-mC-PO-fC-PO- |
| | PS-lT4-PS-lT4 (SEQ ID NO: 582) | mA-PO-mU-PO-mA-PS- |
| | | mA-PS-mA (SEQ ID |
| | | NO: 590) |
| C027.001#21 | lgT3-PS-lgT3-PS-lgT3-PO-mU- | mA-PS-fU-PS-mU-PO- |
| | PO-mA-PO-mU-PO-mG-PO-fG- | mU-PO-mU-PO-fA-PO- |
| | PO-mU-PO-fG-PO-fA-PO-fC- | mA-PO-mA-PO-mA-PO- |
| | PO-mU-PO-mU-PO-mU-PO-mU- | mA-PO-mG-PO-mU-PO- |
| | PO-mU-PO-mA-PO-mA-PO-mA- | mC-PO-fA-PO-mC-PO-fC- |
| | PS-lT4-PS-lT4 (SEQ ID NO: 582) | PO-mA-PO-mU-PO-mA- |
| | | PS-mA-PS-mA (SEQ ID |
| | | NO: 591) |
| C027.001#22 | lgT3-PS-lgT3-PS-lgT3-PO-mU- | mA-PS-fU-PS-mU-PO-fU- |
| | PO-mA-PO-mU-PO-mG-PO-fG- | PO-mU-PO-mA-PO-mA- |
| | PO-mU-PO-fG-PO-fA-PO-fC- | PO-fA-PO-fA-PO-mA-PO- |
| | PO-mU-PO-mU-PO-mU-PO-mU- | mG-PO-mU-PO-mC-PO- |
| | PO-mU-PO-mA-PO-mA-PO-mA- | fA-PO-mC-PO-fC-PO-mA- |
| | PS-lT4-PS-lT4 (SEQ ID NO: 582) | PO-mU-PO-mA-PS-mA- |
| | | PS-mA (SEQ ID NO: 592) |
| C027.001#23 | lgT3-PS-lgT3-PS-lgT3-PO-mU- | mA-PS-fU-PS-mU-PO-fU- |
| | PO-mA-PO-mU-PO-mG-PO-fG- | PO-mU-PO-mA-PO-mA- |
| | PO-mU-PO-fG-PO-fA-PO-fC- | PO-mA-PO-fA-PO-mA- |
| | PO-mU-PO-mU-PO-mU-PO-mU- | PO-mG-PO-mU-PO-mC- |
| | PO-mU-PO-mA-PO-mA-PO-mA- | PO-fA-PO-mC-PO-fC-PO- |
| | PS-lT4-PS-lT4 (SEQ ID NO: 582) | mA-PO-mU-PO-mA-PS- |
| | | mA-PS-mA (SEQ ID |
| | | NO: 593) |
| C027.001#24 | lgT3-PS-lgT3-PS-lgT3-PO-mU- | fA-PS4U-PS-mU-PO-fU- |
| | PO-mA-PO-mU-PO-mG-PO-fG- | PO-mU-PO-fA-PO-mA- |
| | PO-mU-PO-fG-PO-fA-PO-fC- | PO-fA-PO-mA-PO-fA-PO- |
| | PO-mU-PO-mU-PO-mU-PO-mU- | mG-PO-mU-PO-mC-PO- |
| | PO-mU-PO-mA-PO-mA-PO-mA- | fA-PO-mC-PO-fC-PO-mA- |
| | PS-lT4-PS-lT4 (SEQ ID NO: 582) | PO4U-PO-mA-PS-dT-PS- |
| | | dT (SEQ ID NO: 594) |
| C027.001#25 | lgT3-PS-lgT3-PS-lgT3-PO-mU- | mA-PS-fU-PS-mU-PO-fU- |
| | PO-mA-PO-mU-PO-mG-PO-fG- | PO-mU-PO-mA-PO-mA- |
| | PO-mU-PO-fG-PO-fA-PO-fC- | PO-mA-PO-mA-PO-mA- |
| | PO-mU-PO-mU-PO-mU-PO-mU- | PO-mG-PO-mU-PO-mC- |
| | PO-mU-PO-mA-PO-mA-PO-mA- | PO-fA-PO-mC-PO-fC-PO- |
| | PS-lT4-PS-lT4 (SEQ ID NO: 582) | mA-PO-mU-PO-mA-PS- |
| | | lA-PS-lA (SEQ ID |
| | | NO: 595) |
| C027.001#26 | lgT3-PS-lgT3-PS-lgT3-PO-mU- | mA-PS-fU-PS-mU-PO- |
| | PO-mA-PO-mU-PO-mG-PO-fG- | mU-PO-mU-PO-fA-PO- |
| | PO-mU-PO-fG-PO-fA-PO-fC- | mA-PO-mA-PO-mA-PO- |
| | PO-mU-PO-mU-PO-mU-PO-mU- | mA-PO-mG-PO-mU-PO- |
| | PO-mU-PO-mA-PO-mA-PO-mA- | mC-PO-fA-PO-mC-PO-fC- |
| | PS-lT4-PS-lT4 (SEQ ID NO: 582) | PO-mA-PO-mU-PO-mA- |
| | | PS-lA-PS-lA (SEQ ID |
| | | NO: 596) |
| C027.001#27 | lgT3-PS-lgT3-PS-lgT3-PO-mU- | mA-PS-fU-PS-mU-PO-fU- |
| | PO-mA-PO-mU-PO-mG-PO-fG- | PO-mU-PO-mA-PO-mA- |
| | PO-mU-PO-fG-PO-fA-PO-fC- | PO-fA-PO-fA-PO-mA-PO- |
| | PO-mU-PO-mU-PO-mU-PO-mU- | mG-PO-mU-PO-mC-PO- |
| | PO-mU-PO-mA-PO-mA-PO-mA- | fA-PO-mC-PO-fC-PO-mA- |
| | PS-lT4-PS-lT4 (SEQ ID NO: 582) | PO-mU-PO-mA-PS-lA-PS- |
| | | lA (SEQ ID NO: 597) |
| C027.001#28 | lgT3-PS-lgT3-PS-lgT3-PO-mU- | mA-PS-fU-PS-mU-PO-fU- |
| | PO-mA-PO-mU-PO-mG-PO-fG- | PO-mU-PO-mA-PO-mA- |
| | PO-mU-PO-fG-PO-fA-PO-fC- | PO-mA-PO-fA-PO-mA- |
| | PO-mU-PO-mU-PO-mU-PO-mU- | PO-mG-PO-mU-PO-mC- |
| | PO-mU-PO-mA-PO-mA-PO-mA- | PO-fA-PO-mC-PO-fC-PO- |
| | PS-lT4-PS-lT4 (SEQ ID NO: 582) | mA-PO-mU-PO-mA-PS- |
| | | lA-PS-lA (SEQ ID |
| | | NO: 598) |
| C027.001#29 | lgT3-PO-lgT3-PO-lgT3-PO-lU- | mA-PS-fU-PS-mU-PO-fU- |
| | PO-lA-PO-mU-PO-mG-PO-fG- | PO-mU-PO-mA-PO-mA- |
| | PO-mU-PO-fG-PO-fA-PO-fC- | PO-mA-PO-mA-PO-mA- |
| | PO-mU-PO-mU-PO-mU-PO-mU- | PO-mG-PO-mU-PO-mC- |
| | PO-mU-PO-mA-PO-mA-PO-mA- | PO-fA-PO-mC-PO-fC-PO- |
| | PO-lT4-PO-lT4 (SEQ ID | mA-PO-mU-PO-mA-PS- |
| | NO: 583) | mA-PS-mA (SEQ ID |
| | | NO: 590) |
| C027.001#30 | lgT3-PO-lgT3-PO-lgT3-PO-lU- | mA-PS-fU-PS-mU-PO- |
| | PO-lA-PO-mU-PO-mG-PO-fG- | mU-PO-mU-PO-fA-PO- |
| | PO-mU-PO-fG-PO-fA-PO-fC- | mA-PO-mA-PO-mA-PO- |
| | PO-mU-PO-mU-PO-mU-PO-mU- | mA-PO-mG-PO-mU-PO- |
| | PO-mU-PO-mA-PO-mA-PO-mA- | mC-PO-fA-PO-mC-PO-fC- |
| | PO-lT4-PO-lT4 (SEQ ID | PO-mA-PO-mU-PO-mA- |
| | NO: 583) | PS-mA-PS-mA (SEQ ID |
| | | NO: 591) |
| C027.001#31 | lgT3-PO-lgT3-PO-lgT3-PO-lU- | mA-PS-fU-PS-mU-PO-fU- |
| | PO-lA-PO-mU-PO-mG-PO-fG- | PO-mU-PO-mA-PO-mA- |
| | PO-mU-PO-fG-PO-fA-PO-fC- | PO-fA-PO-fA-PO-mA-PO- |
| | PO-mU-PO-mU-PO-mU-PO-mU- | mG-PO-mU-PO-mC-PO- |
| | PO-mU-PO-mA-PO-mA-PO-mA- | fA-PO-mC-PO-fC-PO-mA- |
| | PO-lT4-PO-lT4 (SEQ ID | PO-mU-PO-mA-PS-mA- |
| | NO: 583) | PS-mA (SEQ ID NO: 592) |
| C027.001#32 | lgT3-PO-lgT3-PO-lgT3-PO-lU- | mA-PS-fU-PS-mU-PO-fU- |
| | PO-lA-PO-mU-PO-mG-PO-fG- | PO-mU-PO-mA-PO-mA- |
| | PO-mU-PO-fG-PO-fA-PO-fC- | PO-mA-PO-fA-PO-mA- |
| | PO-mU-PO-mU-PO-mU-PO-mU- | PO-mG-PO-mU-PO-mC- |
| | PO-mU-PO-mA-PO-mA-PO-mA- | PO-fA-PO-mC-PO-fC-PO- |
| | PO-lT4-PO-lT4 (SEQ ID | mA-PO-mU-PO-mA-PS- |
| | NO: 583) | mA-PS-mA (SEQ ID |
| | | NO: 593) |
| C027.001#33 | lgT3-PO-lgT3-PO-lgT3-PO-lU- | fA-PS4U-PS-mU-PO-fU- |
| | PO-lA-PO-mU-PO-mG-PO-fG- | PO-mU-PO-fA-PO-mA- |
| | PO-mU-PO-fG-PO-fA-PO-fC- | PO-fA-PO-mA-PO-fA-PO- |
| | PO-mU-PO-mU-PO-mU-PO-mU- | mG-PO-mU-PO-mC-PO- |
| | PO-mU-PO-mA-PO-mA-PO-mA- | fA-PO-mC-PO-fC-PO-mA- |
| | PO-lT4-PO-lT4 (SEQ ID | PO4U-PO-mA-PS-dT-PS- |
| | NO: 583) | dT (SEQ ID NO: 594) |
| C027.001#34 | lgT3-PS-lgT3-PS-lgT3-PO-lU- | mA-PS-fU-PS-mU-PO-fU- |
| | PO-lA-PO-mU-PO-mG-PO-fG- | PO-mU-PO-mA-PO-mA- |
| | PO-mU-PO-fG-PO-fA-PO-fC- | PO-mA-PO-mA-PO-mA- |
| | PO-mU-PO-mU-PO-mU-PO-mU- | PO-mG-PO-mU-PO-mC- |
| | PO-mU-PO-mA-PO-mA-PO-mA- | PO-fA-PO-mC-PO-fC-PO- |
| | PS-lT4-PS-lT4 (SEQ ID NO: 584) | mA-PO-mU-PO-mA-PS- |
| | | mA-PS-mA (SEQ ID |
| | | NO: 590) |
| C027.001#35 | lgT3-PS-lgT3-PS-lgT3-PO-lU- | mA-PS-fU-PS-mU-PO- |
| | PO-lA-PO-mU-PO-mG-PO-fG- | mU-PO-mU-PO-fA-PO- |
| | PO-mU-PO-fG-PO-fA-PO-fC- | mA-PO-mA-PO-mA-PO- |
| | PO-mU-PO-mU-PO-mU-PO-mU- | mA-PO-mG-PO-mU-PO- |
| | PO-mU-PO-mA-PO-mA-PO-mA- | mC-PO-fA-PO-mC-PO-fC- |
| | PS-lT4-PS-lT4 (SEQ ID NO: 584) | PO-mA-PO-mU-PO-mA- |
| | | PS-mA-PS-mA (SEQ ID |
| | | NO: 591) |
| C027.001#36 | lgT3-PS-lgT3-PS-lgT3-PO-lU- | mA-PS-fU-PS-mU-PO-fU- |
| | PO-lA-PO-mU-PO-mG-PO-fG- | PO-mU-PO-mA-PO-mA- |
| | PO-mU-PO-fG-PO-fA-PO-fC- | PO-fA-PO-fA-PO-mA-PO- |
| | PO-mU-PO-mU-PO-mU-PO-mU- | mG-PO-mU-PO-mC-PO- |
| | PO-mU-PO-mA-PO-mA-PO-mA- | fA-PO-mC-PO-fC-PO-mA- |
| | PS-lT4-PS-lT4 (SEQ ID NO: 584) | PO-mU-PO-mA-PS-mA- |
| | | PS-mA (SEQ ID NO: 592) |
| C027.001#37 | lgT3-PS-lgT3-PS-lgT3-PO-lU- | mA-PS-fU-PS-mU-PO-fU- |
| | PO-lA-PO-mU-PO-mG-PO-fG- | PO-mU-PO-mA-PO-mA- |
| | PO-mU-PO-fG-PO-fA-PO-fC- | PO-mA-PO-fA-PO-mA- |
| | PO-mU-PO-mU-PO-mU-PO-mU- | PO-mG-PO-mU-PO-mC- |
| | PO-mU-PO-mA-PO-mA-PO-mA- | PO-fA-PO-mC-PO-fC-PO- |
| | PS-lT4-PS-lT4 (SEQ ID NO: 584) | mA-PO-mU-PO-mA-PS- |
| | | mA-PS-mA (SEQ ID |
| | | NO: 593) |
| C027.001#38 | lgT3-PS-lgT3-PS-lgT3-PO-lU- | fA-PS4U-PS-mU-PO-fU- |
| | PO-lA-PO-mU-PO-mG-PO-fG- | PO-mU-PO-fA-PO-mA- |
| | PO-mU-PO-fG-PO-fA-PO-fC- | PO-fA-PO-mA-PO-fA-PO- |
| | PO-mU-PO-mU-PO-mU-PO-mU- | mG-PO-mU-PO-mC-PO- |
| | PO-mU-PO-mA-PO-mA-PO-mA- | fA-PO-mC-PO-fC-PO-mA- |
| | PS-lT4-PS-lT4 (SEQ ID NO: 584) | PO4U-PO-mA-PS-dT-PS- |
| | | dT (SEQ ID NO: 594) |
| C027.001#39 | lgT3-PO-lgT3-PO-lgT3-PO-mU- | mA-PS-fU-PS-mU-PO-fU- |
| | PO-mA-PO-mU-PO-mG-PO-fG- | PO-mU-PO-mA-PO-mA- |
| | PO-mU-PO-fG-PO-fA-PO-fC- | PO-mA-PO-mA-PO-mA- |
| | PO-mU-PO-mU-PO-mU-PO-mU- | PO-mG-PO-mU-PO-mC- |
| | PO-mU-PO-mA-PO-mA-PO-mA- | PO-fA-PO-mC-PO-fC-PO- |
| | PO-mA-PO-mU-PO-lT4-PO-lT4 | mA-PO-mU-PO-mA-PS- |
| | (SEQ ID NO: 585) | mA-PS-mA (SEQ ID |
| | | NO: 590) |
| C027.001#40 | lgT3-PO-lgT3-PO-lgT3-PO-mU- | mA-PS-fU-PS-mU-PO- |
| | PO-mA-PO-mU-PO-mG-PO-fG- | mU-PO-mU-PO-fA-PO- |
| | PO-mU-PO-fG-PO-fA-PO-fC- | mA-PO-mA-PO-mA-PO- |
| | PO-mU-PO-mU-PO-mU-PO-mU- | mA-PO-mG-PO-mU-PO- |
| | PO-mU-PO-mA-PO-mA-PO-mA- | mC-PO-fA-PO-mC-PO-fC- |
| | PO-mA-PO-mU-PO-lT4-PO-lT4 | PO-mA-PO-mU-PO-mA- |
| | (SEQ ID NO: 585) | PS-mA-PS-mA (SEQ ID |
| | | NO: 591) |
| C027.001#41 | lgT3-PO-lgT3-PO-lgT3-PO-mU- | mA-PS-fU-PS-mU-PO-fU- |
| | PO-mA-PO-mU-PO-mG-PO-fG- | PO-mU-PO-mA-PO-mA- |
| | PO-mU-PO-fG-PO-fA-PO-fC- | PO-fA-PO-fA-PO-mA-PO- |
| | PO-mU-PO-mU-PO-mU-PO-mU- | mG-PO-mU-PO-mC-PO- |
| | PO-mU-PO-mA-PO-mA-PO-mA- | fA-PO-mC-PO-fC-PO-mA- |
| | PO-mA-PO-mU-PO-lT4-PO-lT4 | PO-mU-PO-mA-PS-mA- |
| | (SEQ ID NO: 585) | PS-mA (SEQ ID NO: 592) |
| C027.001#42 | lgT3-PO-lgT3-PO-lgT3-PO-mU- | mA-PS-fU-PS-mU-PO-fU- |
| | PO-mA-PO-mU-PO-mG-PO-fG- | PO-mU-PO-mA-PO-mA- |
| | PO-mU-PO-fG-PO-fA-PO-fC- | PO-mA-PO-fA-PO-mA- |
| | PO-mU-PO-mU-PO-mU-PO-mU- | PO-mG-PO-mU-PO-mC- |
| | PO-mU-PO-mA-PO-mA-PO-mA- | PO-fA-PO-mC-PO-fC-PO- |
| | PO-mA-PO-mU-PO-lT4-PO-lT4 | mA-PO-mU-PO-mA-PS- |
| | (SEQ ID NO: 585) | mA-PS-mA (SEQ ID |
| | | NO: 593) |
| C027.001#43 | lgT3-PO-lgT3-PO-lgT3-PO-mU- | fA-PS4U-PS-mU-PO-fU- |
| | PO-mA-PO-mU-PO-mG-PO-fG- | PO-mU-PO-fA-PO-mA- |
| | PO-mU-PO-fG-PO-fA-PO-fC- | PO-fA-PO-mA-PO-fA-PO- |
| | PO-mU-PO-mU-PO-mU-PO-mU- | mG-PO-mU-PO-mC-PO- |
| | PO-mU-PO-mA-PO-mA-PO-mA- | fA-PO-mC-PO-fC-PO-mA- |
| | PO-mA-PO-mU-PO-lT4-PO-lT4 | PO4U-PO-mA-PS-dT-PS- |
| | (SEQ ID NO: 585) | dT (SEQ ID NO: 594) |
| C027.001#44 | lgT3-PO-lgT3-PO-lgT3-PO-mU- | mA-PS-fU-PS-mU-PO-fU- |
| | PO-mA-PO-mU-PO-mG-PO-fG- | PO-mU-PO-mA-PO-mA- |
| | PO-mU-PO-fG-PO-fA-PO-fC- | PO-mA-PO-mA-PO-mA- |
| | PO-mU-PO-mU-PO-mU-PO-mU- | PO-mG-PO-mU-PO-mC- |
| | PO-mU-PO-mA-PO-mA-PO-mA- | PO-fA-PO-mC-PO-fC-PO- |
| | PO-mA-PO-mU-PO-lT4-PO-lT4 | mA-PO-mU-PO-mA-PS- |
| | (SEQ ID NO: 585) | lA-PS-lA (SEQ ID |
| | | NO: 595) |
| C027.001#45 | lgT3-PO-lgT3-PO-lgT3-PO-mU- | mA-PS-fU-PS-mU-PO- |
| | PO-mA-PO-mU-PO-mG-PO-fG- | mU-PO-mU-PO-fA-PO- |
| | PO-mU-PO-fG-PO-fA-PO-fC- | mA-PO-mA-PO-mA-PO- |
| | PO-mU-PO-mU-PO-mU-PO-mU- | mA-PO-mG-PO-mU-PO- |
| | PO-mU-PO-mA-PO-mA-PO-mA- | mC-PO-fA-PO-mC-PO-fC- |
| | PO-mA-PO-mU-PO-lT4-PO-lT4 | PO-mA-PO-mU-PO-mA- |
| | (SEQ ID NO: 585) | PS-lA-PS-lA (SEQ ID |
| | | NO: 596) |
| C027.001#46 | lgT3-PO-lgT3-PO-lgT3-PO-mU- | mA-PS-fU-PS-mU-PO-fU- |
| | PO-mA-PO-mU-PO-mG-PO-fG- | PO-mU-PO-mA-PO-mA- |
| | PO-mU-PO-fG-PO-fA-PO-fC- | PO-fA-PO-fA-PO-mA-PO- |
| | PO-mU-PO-mU-PO-mU-PO-mU- | mG-PO-mU-PO-mC-PO- |
| | PO-mU-PO-mA-PO-mA-PO-mA- | fA-PO-mC-PO-fC-PO-mA- |
| | PO-mA-PO-mU-PO-lT4-PO-lT4 | PO-mU-PO-mA-PS-lA-PS- |
| | (SEQ ID NO: 585) | lA (SEQ ID NO: 597) |
| C027.001#47 | lgT3-PO-lgT3-PO-lgT3-PO-mU- | mA-PS-fU-PS-mU-PO-fU- |
| | PO-mA-PO-mU-PO-mG-PO-fG- | PO-mU-PO-mA-PO-mA- |
| | PO-mU-PO-fG-PO-fA-PO-fC- | PO-mA-PO-fA-PO-mA- |
| | PO-mU-PO-mU-PO-mU-PO-mU- | PO-mG-PO-mU-PO-mC- |
| | PO-mU-PO-mA-PO-mA-PO-mA- | PO-fA-PO-mC-PO-fC-PO- |
| | PO-mA-PO-mU-PO-lT4-PO-lT4 | mA-PO-mU-PO-mA-PS- |
| | (SEQ ID NO: 585) | lA-PS-lA (SEQ ID |
| | | NO: 598) |
| C027.001#48 | lgT3-PS-lgT3-PS-lgT3-PO-mU- | mA-PS-fU-PS-mU-PO-fU- |
| | PO-mA-PO-mU-PO-mG-PO-fG- | PO-mU-PO-mA-PO-mA- |
| | PO-mU-PO-fG-PO-fA-PO-fC- | PO-mA-PO-mA-PO-mA- |
| | PO-mU-PO-mU-PO-mU-PO-mU- | PO-mG-PO-mU-PO-mC- |
| | PO-mU-PO-mA-PO-mA-PO-mA- | PO-fA-PO-mC-PO-fC-PO- |
| | PO-mA-PO-mU-PS-lT4-PS-lT4 | mA-PO-mU-PO-mA-PS- |
| | (SEQ ID NO: 586) | mA-PS-mA (SEQ ID |
| | | NO: 590) |
| C027.001#49 | lgT3-PS-lgT3-PS-lgT3-PO-mU- | mA-PS-fU-PS-mU-PO- |
| | PO-mA-PO-mU-PO-mG-PO-fG- | mU-PO-mU-PO-fA-PO- |
| | PO-mU-PO-fG-PO-fA-PO-fC- | mA-PO-mA-PO-mA-PO- |
| | PO-mU-PO-mU-PO-mU-PO-mU- | mA-PO-mG-PO-mU-PO- |
| | PO-mU-PO-mA-PO-mA-PO-mA- | mC-PO-fA-PO-mC-PO-fC- |
| | PO-mA-PO-mU-PS-lT4-PS-lT4 | PO-mA-PO-mU-PO-mA- |
| | (SEQ ID NO: 586) | PS-mA-PS-mA (SEQ ID |
| | | NO: 591) |
| C027.001#50 | lgT3-PS-lgT3-PS-lgT3-PO-mU- | mA-PS-fU-PS-mU-PO-fU- |
| | PO-mA-PO-mU-PO-mG-PO-fG- | PO-mU-PO-mA-PO-mA- |
| | PO-mU-PO-fG-PO-fA-PO-fC- | PO-fA-PO-fA-PO-mA-PO- |
| | PO-mU-PO-mU-PO-mU-PO-mU- | mG-PO-mU-PO-mC-PO- |
| | PO-mU-PO-mA-PO-mA-PO-mA- | fA-PO-mC-PO-fC-PO-mA- |
| | PO-mA-PO-mU-PS-lT4-PS-lT4 | PO-mU-PO-mA-PS-mA- |
| | (SEQ ID NO: 586) | PS-mA (SEQ ID NO: 592) |
| C027.001#51 | lgT3-PS-lgT3-PS-lgT3-PO-mU- | mA-PS-fU-PS-mU-PO-fU- |
| | PO-mA-PO-mU-PO-mG-PO-fG- | PO-mU-PO-mA-PO-mA- |
| | PO-mU-PO-fG-PO-fA-PO-fC- | PO-mA-PO-fA-PO-mA- |
| | PO-mU-PO-mU-PO-mU-PO-mU- | PO-mG-PO-mU-PO-mC- |
| | PO-mU-PO-mA-PO-mA-PO-mA- | PO-fA-PO-mC-PO-fC-PO- |
| | PO-mA-PO-mU-PS-lT4-PS-lT4 | mA-PO-mU-PO-mA-PS- |
| | (SEQ ID NO: 586) | mA-PS-mA (SEQ ID |
| | | NO: 593) |
| C027.001#52 | lgT3-PS-lgT3-PS-lgT3-PO-mU- | fA-PS4U-PS-mU-PO-fU- |
| | PO-mA-PO-mU-PO-mG-PO-fG- | PO-mU-PO-fA-PO-mA- |
| | PO-mU-PO-fG-PO-fA-PO-fC- | PO-fA-PO-mA-PO-fA-PO- |
| | PO-mU-PO-mU-PO-mU-PO-mU- | mG-PO-mU-PO-mC-PO- |
| | PO-mU-PO-mA-PO-mA-PO-mA- | fA-PO-mC-PO-fC-PO-mA- |
| | PO-mA-PO-mU-PS-lT4-PS-lT4 | PO4U-PO-mA-PS-dT-PS- |
| | (SEQ ID NO: 586) | dT (SEQ ID NO: 594) |
| C027.001#53 | lgT3-PS-lgT3-PS-lgT3-PO-mU- | mA-PS-fU-PS-mU-PO-fU- |
| | PO-mA-PO-mU-PO-mG-PO-fG- | PO-mU-PO-mA-PO-mA- |
| | PO-mU-PO-fG-PO-fA-PO-fC- | PO-mA-PO-mA-PO-mA- |
| | PO-mU-PO-mU-PO-mU-PO-mU- | PO-mG-PO-mU-PO-mC- |
| | PO-mU-PO-mA-PO-mA-PO-mA- | PO-fA-PO-mC-PO-fC-PO- |
| | PO-mA-PO-mU-PS-lT4-PS-lT4 | mA-PO-mU-PO-mA-PS- |
| | (SEQ ID NO: 586) | lA-PS-lA (SEQ ID |
| | | NO: 595) |
| C027.001#54 | lgT3-PS-lgT3-PS-lgT3-PO-mU- | mA-PS-fU-PS-mU-PO- |
| | PO-mA-PO-mU-PO-mG-PO-fG- | mU-PO-mU-PO-fA-PO- |
| | PO-mU-PO-fG-PO-fA-PO-fC- | mA-PO-mA-PO-mA-PO- |
| | PO-mU-PO-mU-PO-mU-PO-mU- | mA-PO-mG-PO-mU-PO- |
| | PO-mU-PO-mA-PO-mA-PO-mA- | mC-PO-fA-PO-mC-PO-fC- |
| | PO-mA-PO-mU-PS-lT4-PS-lT4 | PO-mA-PO-mU-PO-mA- |
| | (SEQ ID NO: 586) | PS-lA-PS-lA (SEQ ID |
| | | NO: 596) |
| C027.001#55 | lgT3-PS-lgT3-PS-lgT3-PO-mU- | mA-PS-fU-PS-mU-PO-fU- |
| | PO-mA-PO-mU-PO-mG-PO-fG- | PO-mU-PO-mA-PO-mA- |
| | PO-mU-PO-fG-PO-fA-PO-fC- | PO-fA-PO-fA-PO-mA-PO- |
| | PO-mU-PO-mU-PO-mU-PO-mU- | mG-PO-mU-PO-mC-PO- |
| | PO-mU-PO-mA-PO-mA-PO-mA- | fA-PO-mC-PO-fC-PO-mA- |
| | PO-mA-PO-mU-PS-lT4-PS-lT4 | PO-mU-PO-mA-PS-lA-PS- |
| | (SEQ ID NO: 586) | lA (SEQ ID NO: 597) |
| C027.001#56 | lgT3-PS-lgT3-PS-lgT3-PO-mU- | mA-PS-fU-PS-mU-PO-fU- |
| | PO-mA-PO-mU-PO-mG-PO-fG- | PO-mU-PO-mA-PO-mA- |
| | PO-mU-PO-fG-PO-fA-PO-fC- | PO-mA-PO-fA-PO-mA- |
| | PO-mU-PO-mU-PO-mU-PO-mU- | PO-mG-PO-mU-PO-mC- |
| | PO-mU-PO-mA-PO-mA-PO-mA- | PO-fA-PO-mC-PO-fC-PO- |
| | PO-mA-PO-mU-PS-lT4-PS-lT4 | mA-PO-mU-PO-mA-PS- |
| | (SEQ ID NO: 586) | lA-PS-lA (SEQ ID |
| | NO: 598) | |
| C027.001#57 | lgT3-PO-lgT3-PO-lgT3-PO-lU- | mA-PS-fU-PS-mU-PO-fU- |
| | PO-lA-PO-mU-PO-mG-PO-fG- | PO-mU-PO-mA-PO-mA- |
| | PO-mU-PO-fG-PO-fA-PO-fC- | PO-mA-PO-mA-PO-mA- |
| | PO-mU-PO-mU-PO-mU-PO-mU- | PO-mG-PO-mU-PO-mC- |
| | PO-mU-PO-mA-PO-mA-PO-mA- | PO-fA-PO-mC-PO-fC-PO- |
| | PO-mA-PO-mU-PO-lT4-PO-lT4 | mA-PO-mU-PO-mA-PS- |
| | (SEQ ID NO: 587) | mA-PS-mA (SEQ ID |
| | | NO: 590) |
| C027.001#58 | lgT3-PO-lgT3-PO-lgT3-PO-lU- | mA-PS-fU-PS-mU-PO- |
| | PO-lA-PO-mU-PO-mG-PO-fG- | mU-PO-mU-PO-fA-PO- |
| | PO-mU-PO-fG-PO-fA-PO-fC- | mA-PO-mA-PO-mA-PO- |
| | PO-mU-PO-mU-PO-mU-PO-mU- | mA-PO-mG-PO-mU-PO- |
| | PO-mU-PO-mA-PO-mA-PO-mA- | mC-PO-fA-PO-mC-PO-fC- |
| | PO-mA-PO-mU-PO-lT4-PO-lT4 | PO-mA-PO-mU-PO-mA- |
| | (SEQ ID NO: 587) | PS-mA-PS-mA (SEQ ID |
| | | NO: 591) |
| C027.001#59 | lgT3-PO-lgT3-PO-lgT3-PO-lU- | mA-PS-fU-PS-mU-PO-fU- |
| | PO-lA-PO-mU-PO-mG-PO-fG- | PO-mU-PO-mA-PO-mA- |
| | PO-mU-PO-fG-PO-fA-PO-fC- | PO-fA-PO-fA-PO-mA-PO- |
| | PO-mU-PO-mU-PO-mU-PO-mU- | mG-PO-mU-PO-mC-PO- |
| | PO-mU-PO-mA-PO-mA-PO-mA- | fA-PO-mC-PO-fC-PO-mA- |
| | PO-mA-PO-mU-PO-lT4-PO-lT4 | PO-mU-PO-mA-PS-mA- |
| | (SEQ ID NO: 587) | PS-mA (SEQ ID NO: 592) |
| C027.001#60 | lgT3-PO-lgT3-PO-lgT3-PO-lU- | mA-PS-fU-PS-mU-PO-fU- |
| | PO-lA-PO-mU-PO-mG-PO-fG- | PO-mU-PO-mA-PO-mA- |
| | PO-mU-PO-fG-PO-fA-PO-fC- | PO-mA-PO-fA-PO-mA- |
| | PO-mU-PO-mU-PO-mU-PO-mU- | PO-mG-PO-mU-PO-mC- |
| | PO-mU-PO-mA-PO-mA-PO-mA- | PO-fA-PO-mC-PO-fC-PO- |
| | PO-mA-PO-mU-PO-lT4-PO-lT4 | mA-PO-mU-PO-mA-PS- |
| | (SEQ ID NO: 587) | mA-PS-mA (SEQ ID |
| | | NO: 593) |
| C027.001#61 | lgT3-PO-lgT3-PO-lgT3-PO-lU- | fA-PS4U-PS-mU-PO-fU- |
| | PO-lA-PO-mU-PO-mG-PO-fG- | PO-mU-PO-fA-PO-mA- |
| | PO-mU-PO-fG-PO-fA-PO-fC- | PO-fA-PO-mA-PO-fA-PO- |
| | PO-mU-PO-mU-PO-mU-PO-mU- | mG-PO-mU-PO-mC-PO- |
| | PO-mU-PO-mA-PO-mA-PO-mA- | fA-PO-mC-PO-fC-PO-mA- |
| | PO-mA-PO-mU-PO-lT4-PO-lT4 | PO4U-PO-mA-PS-dT-PS- |
| | (SEQ ID NO: 587) | dT (SEQ ID NO: 594) |
| C027.001#62 | lgT3-PS-lgT3-PS-lgT3-PO-lU- | mA-PS-fU-PS-mU-PO-fU- |
| | PO-lA-PO-mU-PO-mG-PO-fG- | PO-mU-PO-mA-PO-mA- |
| | PO-mU-PO-fG-PO-fA-PO-fC- | PO-mA-PO-mA-PO-mA- |
| | PO-mU-PO-mU-PO-mU-PO-mU- | PO-mG-PO-mU-PO-mC- |
| | PO-mU-PO-mA-PO-mA-PO-mA- | PO-fA-PO-mC-PO-fC-PO- |
| | PO-mA-PO-mU-PS-lT4-PS-lT4 | mA-PO-mU-PO-mA-PS- |
| | (SEQ ID NO: 588) | mA-PS-mA (SEQ ID |
| | | NO: 590) |
| C027.001#63 | lgT3-PS-lgT3-PS-lgT3-PO-lU- | mA-PS-fU-PS-mU-PO- |
| | PO-lA-PO-mU-PO-mG-PO-fG- | mU-PO-mU-PO-fA-PO- |
| | PO-mU-PO-fG-PO-fA-PO-fC- | mA-PO-mA-PO-mA-PO- |
| | PO-mU-PO-mU-PO-mU-PO-mU- | mA-PO-mG-PO-mU-PO- |
| | PO-mU-PO-mA-PO-mA-PO-mA- | mC-PO-fA-PO-mC-PO-fC- |
| | PO-mA-PO-mU-PS-lT4-PS-lT4 | PO-mA-PO-mU-PO-mA- |
| | (SEQ ID NO: 588) | PS-mA-PS-mA (SEQ ID |
| | | NO: 591) |
| C027.001#64 | lgT3-PS-lgT3-PS-lgT3-PO-lU- | mA-PS-fU-PS-mU-PO-fU- |
| | PO-lA-PO-mU-PO-mG-PO-fG- | PO-mU-PO-mA-PO-mA- |
| | PO-mU-PO-fG-PO-fA-PO-fC- | PO-fA-PO-fA-PO-mA-PO- |
| | PO-mU-PO-mU-PO-mU-PO-mU- | mG-PO-mU-PO-mC-PO- |
| | PO-mU-PO-mA-PO-mA-PO-mA- | fA-PO-mC-PO-fC-PO-mA- |
| | PO-mA-PO-mU-PS-lT4-PS-lT4 | PO-mU-PO-mA-PS-mA- |
| | (SEQ ID NO: 588) | PS-mA (SEQ ID NO: 592) |
| C027.001#65 | lgT3-PS-lgT3-PS-lgT3-PO-lU- | mA-PS-fU-PS-mU-PO-fU- |
| | PO-lA-PO-mU-PO-mG-PO-fG- | PO-mU-PO-mA-PO-mA- |
| | PO-mU-PO-fG-PO-fA-PO-fC- | PO-mA-PO-fA-PO-mA- |
| | PO-mU-PO-mU-PO-mU-PO-mU- | PO-mG-PO-mU-PO-mC- |
| | PO-mU-PO-mA-PO-mA-PO-mA- | PO-fA-PO-mC-PO-fC-PO- |
| | PO-mA-PO-mU-PS-lT4-PS-lT4 | mA-PO-mU-PO-mA-PS- |
| | (SEQ ID NO: 588) | mA-PS-mA (SEQ ID |
| | | NO: 593) |
| C027.001#66 | lgT3-PS-lgT3-PS-lgT3-PO-lU- | fA-PS4U-PS-mU-PO-fU- |
| | PO-lA-PO-mU-PO-mG-PO-fG- | PO-mU-PO-fA-PO-mA- |
| | PO-mU-PO-fG-PO-fA-PO-fC- | PO-fA-PO-mA-PO-fA-PO- |
| | PO-mU-PO-mU-PO-mU-PO-mU- | mG-PO-mU-PO-mC-PO- |
| | PO-mU-PO-mA-PO-mA-PO-mA- | fA-PO-mC-PO-fC-PO-mA- |
| | PO-mA-PO-mU-PS-lT4-PS-lT4 | PO4U-PO-mA-PS-dT-PS- |
| | (SEQ ID NO: 588) | dT (SEQ ID NO: 594) |
| C027.002#01 | lgT3-PO-lgT3-PO-lgT3-PO-mG- | mA-PS-fC-PS-mC-PO-fA- |
| | PO-mC-PO-mA-PO-mU-PO-fU- | PO-mU-PO-mA-PO-mU- |
| | PO-mU-PO-fU-PO-fU-PO-fA- | PO-mU-PO-mA-PO-mA- |
| | PO-mU-PO-mU-PO-mA-PO-mA- | PO-mU-PO-mA-PO-mA- |
| | PO-mU-PO-mA-PO-mU-PO-mG- | PO-fA-PO-mA-PO-fA-PO- |
| | PS-mG-PS-mU (SEQ ID NO: 600) | mU-PO-mG-PO-mC-PS- |
| | | mA-PS-mA (SEQ ID |
| | | NO: 611) |
| C027.002#02 | lgT3-PO-lgT3-PO-lgT3-PO-mG- | mA-PS-fC-PS-mC-PO-mA- |
| | PO-mC-PO-mA-PO-mU-PO-fU- | PO-mU-PO-fA-PO-mU- |
| | PO-mU-PO-fU-PO-fU-PO-fA- | PO-mU-PO-mA-PO-mA- |
| | PO-mU-PO-mU-PO-mA-PO-mA- | PO-mU-PO-mA-PO-mA- |
| | PO-mU-PO-mA-PO-mU-PO-mG- | PO-fA-PO-mA-PO-fA-PO- |
| | PS-mG-PS-mU (SEQ ID NO: 600) | mU-PO-mG-PO-mC-PS- |
| | | mA-PS-mA (SEQ ID |
| | | NO: 612) |
| C027.002#03 | lgT3-PO-lgT3-PO-lgT3-PO-mG- | mA-PS-fC-PS-mC-PO-fA- |
| | PO-mC-PO-mA-PO-mU-PO-fU- | PO-mU-PO-mA-PO-mU- |
| | PO-mU-PO-fU-PO-fU-PO-fA- | PO4U-PO-fA-PO-mA-PO- |
| | PO-mU-PO-mU-PO-mA-PO-mA- | mU-PO-mA-PO-mA-PO- |
| | PO-mU-PO-mA-PO-mU-PO-mG- | fA-PO-mA-PO-fA-PO-mU- |
| | PS-mG-PS-mU (SEQ ID NO: 600) | PO-mG-PO-mC-PS-mA- |
| | | PS-mA (SEQ ID NO: 613) |
| C027.002#04 | lgT3-PO-lgT3-PO-lgT3-PO-mG- | mA-PS-fC-PS-mC-PO-fA- |
| | PO-mC-PO-mA-PO-mU-PO-fU- | PO-mU-PO-mA-PO-mU- |
| | PO-mU-PO-fU-PO-fU-PO-fA- | PO-mU-PO-fA-PO-mA- |
| | PO-mU-PO-mU-PO-mA-PO-mA- | PO-mU-PO-mA-PO-mA- |
| | PO-mU-PO-mA-PO-mU-PO-mG- | PO-fA-PO-mA-PO-fA-PO- |
| | PS-mG-PS-mU (SEQ ID NO: 600) | mU-PO-mG-PO-mC-PS- |
| | | mA-PS-mA (SEQ ID |
| | | NO: 614) |
| C027.002#05 | lgT3-PO-lgT3-PO-lgT3-PO-mG- | fA-PS-fC-PS-mC-PO-fA- |
| | PO-mC-PO-mA-PO-mU-PO-fU- | PO-mU-PO-fA-PO-mU- |
| | PO-mU-PO-fU-PO-fU-PO-fA- | PO4U-PO-mA-PO-fA-PO- |
| | PO-mU-PO-mU-PO-mA-PO-mA- | mU-PO-mA-PO-mA-PO- |
| | PO-mU-PO-mA-PO-mU-PO-mG- | fA-PO-mA-PO-fA-PO-mU- |
| | PS-mG-PS-mU (SEQ ID NO: 600) | PO-fG-PO-mC-PS-dT-PS- |
| | | dT (SEQ ID NO: 615) |
| C027.002#06 | lgT3-PO-lgT3-PO-lgT3-PO-lG- | mA-PS-fC-PS-mC-PO-fA- |
| | PO-lC-PO-mA-PO-mU-PO-fU- | PO-mU-PO-mA-PO-mU- |
| | PO-mU-PO-fU-PO-fU-PO-fA- | PO-mU-PO-mA-PO-mA- |
| | PO-mU-PO-mU-PO-mA-PO-mA- | PO-mU-PO-mA-PO-mA- |
| | PO-mU-PO-mA-PO-mU-PO-mG- | PO-fA-PO-mA-PO-fA-PO- |
| | PS-mG-PS-mU (SEQ ID NO: 601) | mU-PO-mG-PO-mC-PS- |
| | | mA-PS-mA (SEQ ID |
| | | NO: 611) |
| C027.002#07 | lgT3-PO-lgT3-PO-lgT3-PO-lG- | mA-PS-fC-PS-mC-PO-mA- |
| | PO-lC-PO-mA-PO-mU-PO-fU- | PO-mU-PO-fA-PO-mU- |
| | PO-mU-PO-fU-PO-fU-PO-fA- | PO-mU-PO-mA-PO-mA- |
| | PO-mU-PO-mU-PO-mA-PO-mA- | PO-mU-PO-mA-PO-mA- |
| | PO-mU-PO-mA-PO-mU-PO-mG- | PO-fA-PO-mA-PO-fA-PO- |
| | PS-mG-PS-mU (SEQ ID NO: 601) | mU-PO-mG-PO-mC-PS- |
| | | mA-PS-mA (SEQ ID |
| | | NO: 612) |
| C027.002#08 | lgT3-PO-lgT3-PO-lgT3-PO-lG- | mA-PS-fC-PS-mC-PO-fA- |
| | PO-lC-PO-mA-PO-mU-PO-fU- | PO-mU-PO-mA-PO-mU- |
| | PO-mU-PO-fU-PO-fU-PO-fA- | PO4U-PO-fA-PO-mA-PO- |
| | PO-mU-PO-mU-PO-mA-PO-mA- | mU-PO-mA-PO-mA-PO- |
| | PO-mU-PO-mA-PO-mU-PO-mG- | fA-PO-mA-PO-fA-PO-mU- |
| | PS-mG-PS-mU (SEQ ID NO: 601) | PO-mG-PO-mC-PS-mA- |
| | | PS-mA (SEQ ID NO: 613) |
| C027.002#09 | lgT3-PO-lgT3-PO-lgT3-PO-lG- | mA-PS-fC-PS-mC-PO-fA- |
| | PO-lC-PO-mA-PO-mU-PO-fU- | PO-mU-PO-mA-PO-mU- |
| | PO-mU-PO-fU-PO-fU-PO-fA- | PO-mU-PO-fA-PO-mA- |
| | PO-mU-PO-mU-PO-mA-PO-mA- | PO-mU-PO-mA-PO-mA- |
| | PO-mU-PO-mA-PO-mU-PO-mG- | PO-fA-PO-mA-PO-fA-PO- |
| | PS-mG-PS-mU (SEQ ID NO: 601) | mU-PO-mG-PO-mC-PS- |
| | | mA-PS-mA (SEQ ID |
| | | NO: 614 ) |
| C027.002#10 | lgT3-PO-lgT3-PO-lgT3-PO-lG- | fA-PS-fC-PS-mC-PO-fA- |
| | PO-lC-PO-mA-PO-mU-PO-fU- | PO-mU-PO-fA-PO-mU- |
| | PO-mU-PO-fU-PO-fU-PO-fA- | PO4U-PO-mA-PO-fA-PO- |
| | PO-mU-PO-mU-PO-mA-PO-mA- | mU-PO-mA-PO-mA-PO- |
| | PO-mU-PO-mA-PO-mU-PO-mG- | fA-PO-mA-PO-fA-PO-mU- |
| | PS-mG-PS-mU (SEQ ID NO: 601) | PO-fG-PO-mC-PS-dT-PS- |
| | | dT (SEQ ID NO: 615) |
| C027.002#11 | lgT3-PO-lgT3-PO-lgT3-PO-mG- | mA-PS-fC-PS-mC-PO-fA- |
| | PO-mC-PO-mA-PO-mU-PO-fU- | PO-mU-PO-mA-PO-mU- |
| | PO-mU-PO-fU-PO-fU-PO-fA- | PO-mU-PO-mA-PO-mA- |
| | PO-mU-PO-mU-PO-mA-PO-mA- | PO-mU-PO-mA-PO-mA- |
| | PO-mU-PO-mA-PO-mU-PO-mG- | PO-fA-PO-mA-PO-fA-PO- |
| | PO-lT4-PO-lT4 (SEQ ID | mU-PO-mG-PO-mC-PS- |
| | NO: 602) | mA-PS-mA (SEQ ID |
| | | NO: 611) |
| C027.002#12 | lgT3-PO-lgT3-PO-lgT3-PO-mG- | mA-PS-fC-PS-mC-PO-mA- |
| | PO-mC-PO-mA-PO-mU-PO-fU- | PO-mU-PO-fA-PO-mU- |
| | PO-mU-PO-fU-PO-fU-PO-fA- | PO-mU-PO-mA-PO-mA- |
| | PO-mU-PO-mU-PO-mA-PO-mA- | PO-mU-PO-mA-PO-mA- |
| | PO-mU-PO-mA-PO-mU-PO-mG- | PO-fA-PO-mA-PO-fA-PO- |
| | PO-lT4-PO-lT4 (SEQ ID | mU-PO-mG-PO-mC-PS- |
| | NO: 602) | mA-PS-mA (SEQ ID |
| | | NO: 612) |
| C027.002#13 | lgT3-PO-lgT3-PO-lgT3-PO-mG- | mA-PS-fC-PS-mC-PO-fA- |
| | PO-mC-PO-mA-PO-mU-PO-fU- | PO-mU-PO-mA-PO-mU- |
| | PO-mU-PO-fU-PO-fU-PO-fA- | PO4U-PO-fA-PO-mA-PO- |
| | PO-mU-PO-mU-PO-mA-PO-mA- | mU-PO-mA-PO-mA-PO- |
| | PO-mU-PO-mA-PO-mU-PO-mG- | fA-PO-mA-PO-fA-PO-mU- |
| | PO-lT4-PO-lT4 (SEQ ID | PO-mG-PO-mC-PS-mA- |
| | NO: 602) | PS-mA (SEQ ID NO: 613) |
| C027.002#14 | lgT3-PO-lgT3-PO-lgT3-PO-mG- | mA-PS-fC-PS-mC-PO-fA- |
| | PO-mC-PO-mA-PO-mU-PO-fU- | PO-mU-PO-mA-PO-mU- |
| | PO-mU-PO-fU-PO-fU-PO-fA- | PO-mU-PO-fA-PO-mA- |
| | PO-mU-PO-mU-PO-mA-PO-mA- | PO-mU-PO-mA-PO-mA- |
| | PO-mU-PO-mA-PO-mU-PO-mG- | PO-fA-PO-mA-PO-fA-PO- |
| | PO-lT4-PO-lT4 (SEQ ID | mU-PO-mG-PO-mC-PS- |
| | NO: 602) | mA-PS-mA (SEQ ID |
| | | NO: 614) |
| C027.002#15 | lgT3-PO-lgT3-PO-lgT3-PO-mG- | fA-PS-fC-PS-mC-PO-fA- |
| | PO-mC-PO-mA-PO-mU-PO-fU- | PO-mU-PO-fA-PO-mU- |
| | PO-mU-PO-fU-PO-fU-PO-fA- | PO4U-PO-mA-PO-fA-PO- |
| | PO-mU-PO-mU-PO-mA-PO-mA- | mU-PO-mA-PO-mA-PO- |
| | PO-mU-PO-mA-PO-mU-PO-mG- | fA-PO-mA-PO-fA-PO-mU- |
| | PO-lT4-PO-lT4 (SEQ ID | PO-fG-PO-mC-PS-dT-PS- |
| | NO: 602) | dT (SEQ ID NO: 615) |
| C027.002#16 | lgT3-PO-lgT3-PO-lgT3-PO-mG- | mA-PS-fC-PS-mC-PO-fA- |
| | PO-mC-PO-mA-PO-mU-PO-fU- | PO-mU-PO-mA-PO-mU- |
| | PO-mU-PO-fU-PO-fU-PO-fA- | PO-mU-PO-mA-PO-mA- |
| | PO-mU-PO-mU-PO-mA-PO-mA- | PO-mU-PO-mA-PO-mA- |
| | PO-mU-PO-mA-PO-mU-PO-mG- | PO-fA-PO-mA-PO-fA-PO- |
| | PO-lT4-PO-lT4 (SEQ ID | mU-PO-mG-PO-mC-PS- |
| | NO: 602) | lA-PS-lA (SEQ ID |
| | | NO: 616) |
| C027.002#17 | lgT3-PO-lgT3-PO-lgT3-PO-mG- | mA-PS-fC-PS-mC-PO-mA- |
| | PO-mC-PO-mA-PO-mU-PO-fU- | PO-mU-PO-fA-PO-mU- |
| | PO-mU-PO-fU-PO-fU-PO-fA- | PO-mU-PO-mA-PO-mA- |
| | PO-mU-PO-mU-PO-mA-PO-mA- | PO-mU-PO-mA-PO-mA- |
| | PO-mU-PO-mA-PO-mU-PO-mG- | PO-fA-PO-mA-PO-fA-PO- |
| | PO-lT4-PO-lT4 (SEQ ID | mU-PO-mG-PO-mC-PS- |
| | NO: 602) | lA-PS-lA (SEQ ID |
| | | NO: 617) |
| C027.002#18 | lgT3-PO-lgT3-PO-lgT3-PO-mG- | mA-PS-fC-PS-mC-PO-fA- |
| | PO-mC-PO-mA-PO-mU-PO-fU- | PO-mU-PO-mA-PO-mU- |
| | PO-mU-PO-fU-PO-fU-PO-fA- | PO4U-PO-fA-PO-mA-PO- |
| | PO-mU-PO-mU-PO-mA-PO-mA- | mU-PO-mA-PO-mA-PO- |
| | PO-mU-PO-mA-PO-mU-PO-mG- | fA-PO-mA-PO-fA-PO-mU- |
| | PO-lT4-PO-lT4 (SEQ ID | PO-mG-PO-mC-PS-lA-PS- |
| | NO: 602) | lA (SEQ ID NO: 618) |
| C027.002#19 | lgT3-PO-lgT3-PO-lgT3-PO-mG- | mA-PS-fC-PS-mC-PO-fA- |
| | PO-mC-PO-mA-PO-mU-PO-fU- | PO-mU-PO-mA-PO-mU- |
| | PO-mU-PO-fU-PO-fU-PO-fA- | PO-mU-PO-fA-PO-mA- |
| | PO-mU-PO-mU-PO-mA-PO-mA- | PO-mU-PO-mA-PO-mA- |
| | PO-mU-PO-mA-PO-mU-PO-mG- | PO-fA-PO-mA-PO-fA-PO- |
| | PO-lT4-PO-lT4 (SEQ ID | mU-PO-mG-PO-mC-PS- |
| | NO: 602) | lA-PS-lA (SEQ ID |
| | | NO: 619) |
| C027.002#20 | lgT3-PS-lgT3-PS-lgT3-PO-mG- | mA-PS-fC-PS-mC-PO-fA- |
| | PO-mC-PO-mA-PO-mU-PO-fU- | PO-mU-PO-mA-PO-mU- |
| | PO-mU-PO-fU-PO-fU-PO-fA- | PO-mU-PO-mA-PO-mA- |
| | PO-mU-PO-mU-PO-mA-PO-mA- | PO-mU-PO-mA-PO-mA- |
| | PO-mU-PO-mA-PO-mU-PO-mG- | PO-fA-PO-mA-PO-fA-PO- |
| | PS-lT4-PS-lT4 (SEQ ID NO: 603) | mU-PO-mG-PO-mC-PS- |
| | | mA-PS-mA (SEQ ID |
| | | NO: 611) |
| C027.002#21 | lgT3-PS-lgT3-PS-lgT3-PO-mG- | mA-PS-fC-PS-mC-PO-mA- |
| | PO-mC-PO-mA-PO-mU-PO-fU- | PO-mU-PO-fA-PO-mU- |
| | PO-mU-PO-fU-PO-fU-PO-fA- | PO-mU-PO-mA-PO-mA- |
| | PO-mU-PO-mU-PO-mA-PO-mA- | PO-mU-PO-mA-PO-mA- |
| | PO-mU-PO-mA-PO-mU-PO-mG- | PO-fA-PO-mA-PO-fA-PO- |
| | PS-lT4-PS-lT4 (SEQ ID NO: 603) | mU-PO-mG-PO-mC-PS- |
| | | mA-PS-mA (SEQ ID |
| | | NO: 612) |
| C027.002#22 | lgT3-PS-lgT3-PS-lgT3-PO-mG- | mA-PS-fC-PS-mC-PO-fA- |
| | PO-mC-PO-mA-PO-mU-PO-fU- | PO-mU-PO-mA-PO-mU- |
| | PO-mU-PO-fU-PO-fU-PO-fA- | PO4U-PO-fA-PO-mA-PO- |
| | PO-mU-PO-mU-PO-mA-PO-mA- | mU-PO-mA-PO-mA-PO- |
| | PO-mU-PO-mA-PO-mU-PO-mG- | fA-PO-mA-PO-fA-PO-mU- |
| | PS-lT4-PS-lT4 (SEQ ID NO: 603) | PO-mG-PO-mC-PS-mA- |
| | | PS-mA (SEQ ID NO: 613) |
| C027.002#23 | lgT3-PS-lgT3-PS-lgT3-PO-mG- | mA-PS-fC-PS-mC-PO-fA- |
| | PO-mC-PO-mA-PO-mU-PO-fU- | PO-mU-PO-mA-PO-mU- |
| | PO-mU-PO-fU-PO-fU-PO-fA- | PO-mU-PO-fA-PO-mA- |
| | PO-mU-PO-mU-PO-mA-PO-mA- | PO-mU-PO-mA-PO-mA- |
| | PO-mU-PO-mA-PO-mU-PO-mG- | PO-fA-PO-mA-PO-fA-PO- |
| | PS-lT4-PS-lT4 (SEQ ID NO: 603) | mU-PO-mG-PO-mC-PS- |
| | | mA-PS-mA (SEQ ID |
| | | NO: 614) |
| C027.002#24 | lgT3-PS-lgT3-PS-lgT3-PO-mG- | fA-PS-fC-PS-mC-PO-fA- |
| | PO-mC-PO-mA-PO-mU-PO-fU- | PO-mU-PO-fA-PO-mU- |
| | PO-mU-PO-fU-PO-fU-PO-fA- | PO4U-PO-mA-PO-fA-PO- |
| | PO-mU-PO-mU-PO-mA-PO-mA- | mU-PO-mA-PO-mA-PO- |
| | PO-mU-PO-mA-PO-mU-PO-mG- | fA-PO-mA-PO-fA-PO-mU- |
| | PS-lT4-PS-lT4 (SEQ ID NO: 603) | PO-fG-PO-mC-PS-dT-PS- |
| | | dT (SEQ ID NO: 615) |
| C027.002#25 | lgT3-PS-lgT3-PS-lgT3-PO-mG- | mA-PS-fC-PS-mC-PO-fA- |
| | PO-mC-PO-mA-PO-mU-PO-fU- | PO-mU-PO-mA-PO-mU- |
| | PO-mU-PO-fU-PO-fU-PO-fA- | PO-mU-PO-mA-PO-mA- |
| | PO-mU-PO-mU-PO-mA-PO-mA- | PO-mU-PO-mA-PO-mA- |
| | PO-mU-PO-mA-PO-mU-PO-mG- | PO-fA-PO-mA-PO-fA-PO- |
| | PS-lT4-PS-lT4 (SEQ ID NO: 603) | mU-PO-mG-PO-mC-PS- |
| | | lA-PS-lA (SEQ ID |
| | | NO: 616) |
| C027.002#26 | lgT3-PS-lgT3-PS-lgT3-PO-mG- | mA-PS-fC-PS-mC-PO-mA- |
| | PO-mC-PO-mA-PO-mU-PO-fU- | PO-mU-PO-fA-PO-mU- |
| | PO-mU-PO-fU-PO-fU-PO-fA- | PO-mU-PO-mA-PO-mA- |
| | PO-mU-PO-mU-PO-mA-PO-mA- | PO-mU-PO-mA-PO-mA- |
| | PO-mU-PO-mA-PO-mU-PO-mG- | PO-fA-PO-mA-PO-fA-PO- |
| | PS-lT4-PS-lT4 (SEQ ID NO: 603) | mU-PO-mG-PO-mC-PS- |
| | | lA-PS-lA (SEQ ID |
| | | NO: 617) |
| C027.002#27 | lgT3-PS-lgT3-PS-lgT3-PO-mG- | mA-PS-fC-PS-mC-PO-fA- |
| | PO-mC-PO-mA-PO-mU-PO-fU- | PO-mU-PO-mA-PO-mU- |
| | PO-mU-PO-fU-PO-fU-PO-fA- | PO4U-PO-fA-PO-mA-PO- |
| | PO-mU-PO-mU-PO-mA-PO-mA- | mU-PO-mA-PO-mA-PO- |
| | PO-mU-PO-mA-PO-mU-PO-mG- | fA-PO-mA-PO-fA-PO-mU- |
| | PS-lT4-PS-lT4 (SEQ ID NO: 603) | PO-mG-PO-mC-PS-lA-PS- |
| | | lA (SEQ ID NO: 618) |
| C027.002#28 | lgT3-PS-lgT3-PS-lgT3-PO-mG- | mA-PS-fC-PS-mC-PO-fA- |
| | PO-mC-PO-mA-PO-mU-PO-fU- | PO-mU-PO-mA-PO-mU- |
| | PO-mU-PO-fU-PO-fU-PO-fA- | PO-mU-PO-fA-PO-mA- |
| | PO-mU-PO-mU-PO-mA-PO-mA- | PO-mU-PO-mA-PO-mA- |
| | PO-mU-PO-mA-PO-mU-PO-mG- | PO-fA-PO-mA-PO-fA-PO- |
| | PS-lT4-PS-lT4 (SEQ ID NO: 603) | mU-PO-mG-PO-mC-PS- |
| | | lA-PS-lA (SEQ ID |
| | | NO: 619) |
| C027.002#29 | lgT3-PO-lgT3-PO-lgT3-PO-lG- | mA-PS-fC-PS-mC-PO-fA- |
| | PO-lC-PO-mA-PO-mU-PO-fU- | PO-mU-PO-mA-PO-mU- |
| | PO-mU-PO-fU-PO-fU-PO-fA- | PO-mU-PO-mA-PO-mA- |
| | PO-mU-PO-mU-PO-mA-PO-mA- | PO-mU-PO-mA-PO-mA- |
| | PO-mU-PO-mA-PO-mU-PO-mG- | PO-fA-PO-mA-PO-fA-PO- |
| | PO-lT4-PO-lT4 (SEQ ID | mU-PO-mG-PO-mC-PS- |
| | NO: 604) | mA-PS-mA (SEQ ID |
| | | NO: 611) |
| C027.002#30 | lgT3-PO-lgT3-PO-lgT3-PO-lG- | mA-PS-fC-PS-mC-PO-mA- |
| | PO-lC-PO-mA-PO-mU-PO-fU- | PO-mU-PO-fA-PO-mU- |
| | PO-mU-PO-fU-PO-fU-PO-fA- | PO-mU-PO-mA-PO-mA- |
| | PO-mU-PO-mU-PO-mA-PO-mA- | PO-mU-PO-mA-PO-mA- |
| | PO-mU-PO-mA-PO-mU-PO-mG- | PO-fA-PO-mA-PO-fA-PO- |
| | PO-lT4-PO-lT4 (SEQ ID | mU-PO-mG-PO-mC-PS- |
| | NO: 604) | mA-PS-mA (SEQ ID |
| | | NO: 612) |
| C027.002#31 | lgT3-PO-lgT3-PO-lgT3-PO-lG- | mA-PS-fC-PS-mC-PO-fA- |
| | PO-lC-PO-mA-PO-mU-PO-fU- | PO-mU-PO-mA-PO-mU- |
| | PO-mU-PO-fU-PO-fU-PO-fA- | PO4U-PO-fA-PO-mA-PO- |
| | PO-mU-PO-mU-PO-mA-PO-mA- | mU-PO-mA-PO-mA-PO- |
| | PO-mU-PO-mA-PO-mU-PO-mG- | fA-PO-mA-PO-fA-PO-mU- |
| | PO-lT4-PO-lT4 (SEQ ID | PO-mG-PO-mC-PS-mA- |
| | NO: 604) | PS-mA (SEQ ID NO: 613) |
| C027.002#32 | lgT3-PO-lgT3-PO-lgT3-PO-lG- | mA-PS-fC-PS-mC-PO-fA- |
| | PO-lC-PO-mA-PO-mU-PO-fU- | PO-mU-PO-mA-PO-mU- |
| | PO-mU-PO-fU-PO-fU-PO-fA- | PO-mU-PO-fA-PO-mA- |
| | PO-mU-PO-mU-PO-mA-PO-mA- | PO-mU-PO-mA-PO-mA- |
| | PO-mU-PO-mA-PO-mU-PO-mG- | PO-fA-PO-mA-PO-fA-PO- |
| | PO-lT4-PO-lT4 (SEQ ID | mU-PO-mG-PO-mC-PS- |
| | NO: 604) | mA-PS-mA (SEQ ID |
| | | NO: 614) |
| C027.002#33 | lgT3-PO-lgT3-PO-lgT3-PO-lG- | fA-PS-fC-PS-mC-PO-fA- |
| | PO-lC-PO-mA-PO-mU-PO-fU- | PO-mU-PO-fA-PO-mU- |
| | PO-mU-PO-fU-PO-fU-PO-fA- | PO4U-PO-mA-PO-fA-PO- |
| | PO-mU-PO-mU-PO-mA-PO-mA- | mU-PO-mA-PO-mA-PO- |
| | PO-mU-PO-mA-PO-mU-PO-mG- | fA-PO-mA-PO-fA-PO-mU- |
| | PO-lT4-PO-lT4 (SEQ ID | PO-fG-PO-mC-PS-dT-PS- |
| | NO: 604) | dT (SEQ ID NO: 615) |
| C027.002#34 | lgT3-PS-lgT3-PS-lgT3-PO-lG- | mA-PS-fC-PS-mC-PO-fA- |
| | PO-lC-PO-mA-PO-mU-PO-fU- | PO-mU-PO-mA-PO-mU- |
| | PO-mU-PO-fU-PO-fU-PO-fA- | PO-mU-PO-mA-PO-mA- |
| | PO-mU-PO-mU-PO-mA-PO-mA- | PO-mU-PO-mA-PO-mA- |
| | PO-mU-PO-mA-PO-mU-PO-mG- | PO-fA-PO-mA-PO-fA-PO- |
| | PS-lT4-PS-lT4 (SEQ ID NO: 605) | mU-PO-mG-PO-mC-PS- |
| | | mA-PS-mA (SEQ ID |
| | | NO: 611) |
| C027.002#35 | lgT3-PS-lgT3-PS-lgT3-PO-lG- | mA-PS-fC-PS-mC-PO-mA- |
| | PO-lC-PO-mA-PO-mU-PO-fU- | PO-mU-PO-fA-PO-mU- |
| | PO-mU-PO-fU-PO-fU-PO-fA- | PO-mU-PO-mA-PO-mA- |
| | PO-mU-PO-mU-PO-mA-PO-mA- | PO-mU-PO-mA-PO-mA- |
| | PO-mU-PO-mA-PO-mU-PO-mG- | PO-fA-PO-mA-PO-fA-PO- |
| | PS-lT4-PS-lT4 (SEQ ID NO: 605) | mU-PO-mG-PO-mC-PS- |
| | | mA-PS-mA (SEQ ID |
| | | NO: 612) |
| C027.002#36 | lgT3-PS-lgT3-PS-lgT3-PO-lG- | mA-PS-fC-PS-mC-PO-fA- |
| | PO-lC-PO-mA-PO-mU-PO-fU- | PO-mU-PO-mA-PO-mU- |
| | PO-mU-PO-fU-PO-fU-PO-fA- | PO4U-PO-fA-PO-mA-PO- |
| | PO-mU-PO-mU-PO-mA-PO-mA- | mU-PO-mA-PO-mA-PO- |
| | PO-mU-PO-mA-PO-mU-PO-mG- | fA-PO-mA-PO-fA-PO-mU- |
| | PS-lT4-PS-lT4 (SEQ ID NO: 605) | PO-mG-PO-mC-PS-mA- |
| | | PS-mA (SEQ ID NO: 613) |
| C027.002#37 | lgT3-PS-lgT3-PS-lgT3-PO-lG- | mA-PS-fC-PS-mC-PO-fA- |
| | PO-lC-PO-mA-PO-mU-PO-fU- | PO-mU-PO-mA-PO-mU- |
| | PO-mU-PO-fU-PO-fU-PO-fA- | PO-mU-PO-fA-PO-mA- |
| | PO-mU-PO-mU-PO-mA-PO-mA- | PO-mU-PO-mA-PO-mA- |
| | PO-mU-PO-mA-PO-mU-PO-mG- | PO-fA-PO-mA-PO-fA-PO- |
| | PS-lT4-PS-lT4 (SEQ ID NO: 605) | mU-PO-mG-PO-mC-PS- |
| | | mA-PS-mA (SEQ ID |
| | | NO: 614) |
| C027.002#38 | lgT3-PS-lgT3-PS-lgT3-PO-lG- | fA-PS-fC-PS-mC-PO-fA- |
| | PO-lC-PO-mA-PO-mU-PO-fU- | PO-mU-PO-fA-PO-mU- |
| | PO-mU-PO-fU-PO-fU-PO-fA- | PO4U-PO-mA-PO-fA-PO- |
| | PO-mU-PO-mU-PO-mA-PO-mA- | mU-PO-mA-PO-mA-PO- |
| | PO-mU-PO-mA-PO-mU-PO-mG- | fA-PO-mA-PO-fA-PO-mU- |
| | PS-lT4-PS-lT4 (SEQ ID NO: 605) | PO-fG-PO-mC-PS-dT-PS- |
| | | dT (SEQ ID NO: 615) |
| C027.002#39 | lgT3-PO-lgT3-PO-lgT3-PO-mG- | mA-PS-fC-PS-mC-PO-fA- |
| | PO-mC-PO-mA-PO-mU-PO-fU- | PO-mU-PO-mA-PO-mU- |
| | PO-mU-PO-fU-PO-fU-PO-fA- | PO-mU-PO-mA-PO-mA- |
| | PO-mU-PO-mU-PO-mA-PO-mA- | PO-mU-PO-mA-PO-mA- |
| | PO-mU-PO-mA-PO-mU-PO-mG- | PO-fA-PO-mA-PO-fA-PO- |
| | PO-mG-PO-mU-PO-lT4-PO-lT4 | mU-PO-mG-PO-mC-PS- |
| | (SEQ ID NO: 606) | mA-PS-mA (SEQ ID |
| | | NO: 611) |
| C027.002#40 | lgT3-PO-lgT3-PO-lgT3-PO-mG- | mA-PS-fC-PS-mC-PO-mA- |
| | PO-mC-PO-mA-PO-mU-PO-fU- | PO-mU-PO-fA-PO-mU- |
| | PO-mU-PO-fU-PO-fU-PO-fA- | PO-mU-PO-mA-PO-mA- |
| | PO-mU-PO-mU-PO-mA-PO-mA- | PO-mU-PO-mA-PO-mA- |
| | PO-mU-PO-mA-PO-mU-PO-mG- | PO-fA-PO-mA-PO-fA-PO- |
| | PO-mG-PO-mU-PO-lT4-PO-lT4 | mU-PO-mG-PO-mC-PS- |
| | (SEQ ID NO: 606) | mA-PS-mA (SEQ ID |
| | | NO: 612) |
| C027.002#41 | lgT3-PO-lgT3-PO-lgT3-PO-mG- | mA-PS-fC-PS-mC-PO-fA- |
| | PO-mC-PO-mA-PO-mU-PO-fU- | PO-mU-PO-mA-PO-mU- |
| | PO-mU-PO-fU-PO-fU-PO-fA- | PO4U-PO-fA-PO-mA-PO- |
| | PO-mU-PO-mU-PO-mA-PO-mA- | mU-PO-mA-PO-mA-PO- |
| | PO-mU-PO-mA-PO-mU-PO-mG- | fA-PO-mA-PO-fA-PO-mU- |
| | PO-mG-PO-mU-PO-lT4-PO-lT4 | PO-mG-PO-mC-PS-mA- |
| | (SEQ ID NO: 606) | PS-mA (SEQ ID NO: 613) |
| C027.002#42 | lgT3-PO-lgT3-PO-lgT3-PO-mG- | mA-PS-fC-PS-mC-PO-fA- |
| | PO-mC-PO-mA-PO-mU-PO-fU- | PO-mU-PO-mA-PO-mU- |
| | PO-mU-PO-fU-PO-fU-PO-fA- | PO-mU-PO-fA-PO-mA- |
| | PO-mU-PO-mU-PO-mA-PO-mA- | PO-mU-PO-mA-PO-mA- |
| | PO-mU-PO-mA-PO-mU-PO-mG- | PO-fA-PO-mA-PO-fA-PO- |
| | PO-mG-PO-mU-PO-lT4-PO-lT4 | mU-PO-mG-PO-mC-PS- |
| | (SEQ ID NO: 606) | mA-PS-mA (SEQ ID |
| | | NO: 614) |
| C027.002#43 | lgT3-PO-lgT3-PO-lgT3-PO-mG- | fA-PS-fC-PS-mC-PO-fA- |
| | PO-mC-PO-mA-PO-mU-PO-fU- | PO-mU-PO-fA-PO-mU- |
| | PO-mU-PO-fU-PO-fU-PO-fA- | PO4U-PO-mA-PO-fA-PO- |
| | PO-mU-PO-mU-PO-mA-PO-mA- | mU-PO-mA-PO-mA-PO- |
| | PO-mU-PO-mA-PO-mU-PO-mG- | fA-PO-mA-PO-fA-PO-mU- |
| | PO-mG-PO-mU-PO-lT4-PO-lT4 | PO-fG-PO-mC-PS-dT-PS- |
| | (SEQ ID NO: 606) | dT (SEQ ID NO: 615) |
| C027.002#44 | lgT3-PO-lgT3-PO-lgT3-PO-mG- | mA-PS-fC-PS-mC-PO-fA- |
| | PO-mC-PO-mA-PO-mU-PO-fU- | PO-mU-PO-mA-PO-mU- |
| | PO-mU-PO-fU-PO-fU-PO-fA- | PO-mU-PO-mA-PO-mA- |
| | PO-mU-PO-mU-PO-mA-PO-mA- | PO-mU-PO-mA-PO-mA- |
| | PO-mU-PO-mA-PO-mU-PO-mG- | PO-fA-PO-mA-PO-fA-PO- |
| | PO-mG-PO-mU-PO-lT4-PO-lT4 | mU-PO-mG-PO-mC-PS- |
| | (SEQ ID NO: 606) | lA-PS-lA (SEQ ID |
| | | NO: 616) |
| C027.002#45 | lgT3-PO-lgT3-PO-lgT3-PO-mG- | mA-PS-fC-PS-mC-PO-mA- |
| | PO-mC-PO-mA-PO-mU-PO-fU- | PO-mU-PO-fA-PO-mU- |
| | PO-mU-PO-fU-PO-fU-PO-fA- | PO-mU-PO-mA-PO-mA- |
| | PO-mU-PO-mU-PO-mA-PO-mA- | PO-mU-PO-mA-PO-mA- |
| | PO-mU-PO-mA-PO-mU-PO-mG- | PO-fA-PO-mA-PO-fA-PO- |
| | PO-mG-PO-mU-PO-lT4-PO-lT4 | mU-PO-mG-PO-mC-PS- |
| | (SEQ ID NO: 606) | lA-PS-lA (SEQ ID |
| | | NO: 617) |
| C027.002#46 | lgT3-PO-lgT3-PO-lgT3-PO-mG- | mA-PS-fC-PS-mC-PO-fA- |
| | PO-mC-PO-mA-PO-mU-PO-fU- | PO-mU-PO-mA-PO-mU- |
| | PO-mU-PO-fU-PO-fU-PO-fA- | PO4U-PO-fA-PO-mA-PO- |
| | PO-mU-PO-mU-PO-mA-PO-mA- | mU-PO-mA-PO-mA-PO- |
| | PO-mU-PO-mA-PO-mU-PO-mG- | fA-PO-mA-PO-fA-PO-mU- |
| | PO-mG-PO-mU-PO-lT4-PO-lT4 | PO-mG-PO-mC-PS-lA-PS- |
| | (SEQ ID NO: 606) | lA (SEQ ID NO: 618) |
| C027.002#47 | lgT3-PO-lgT3-PO-lgT3-PO-mG- | mA-PS-fC-PS-mC-PO-fA- |
| | PO-mC-PO-mA-PO-mU-PO-fU- | PO-mU-PO-mA-PO-mU- |
| | PO-mU-PO-fU-PO-fU-PO-fA- | PO-mU-PO-fA-PO-mA- |
| | PO-mU-PO-mU-PO-mA-PO-mA- | PO-mU-PO-mA-PO-mA- |
| | PO-mU-PO-mA-PO-mU-PO-mG- | PO-fA-PO-mA-PO-fA-PO- |
| | PO-mG-PO-mU-PO-lT4-PO-lT4 | mU-PO-mG-PO-mC-PS- |
| | (SEQ ID NO: 606) | lA-PS-lA (SEQ ID |
| | | NO: 619) |
| C027.002#48 | lgT3-PS-lgT3-PS-lgT3-PO-mG- | mA-PS-fC-PS-mC-PO-fA- |
| | PO-mC-PO-mA-PO-mU-PO-fU- | PO-mU-PO-mA-PO-mU- |
| | PO-mU-PO-fU-PO-fU-PO-fA- | PO-mU-PO-mA-PO-mA- |
| | PO-mU-PO-mU-PO-mA-PO-mA- | PO-mU-PO-mA-PO-mA- |
| | PO-mU-PO-mA-PO-mU-PO-mG- | PO-fA-PO-mA-PO-fA-PO- |
| | PO-mG-PO-mU-PS-lT4-PS-lT4 | mU-PO-mG-PO-mC-PS- |
| | (SEQ ID NO: 607) | mA-PS-mA (SEQ ID |
| | | NO: 611) |
| C027.002#49 | lgT3-PS-lgT3-PS-lgT3-PO-mG- | mA-PS-fC-PS-mC-PO-mA- |
| | PO-mC-PO-mA-PO-mU-PO-fU- | PO-mU-PO-fA-PO-mU- |
| | PO-mU-PO-fU-PO-fU-PO-fA- | PO-mU-PO-mA-PO-mA- |
| | PO-mU-PO-mU-PO-mA-PO-mA- | PO-mU-PO-mA-PO-mA- |
| | PO-mU-PO-mA-PO-mU-PO-mG- | PO-fA-PO-mA-PO-fA-PO- |
| | PO-mG-PO-mU-PS-lT4-PS-lT4 | mU-PO-mG-PO-mC-PS- |
| | (SEQ ID NO: 607) | mA-PS-mA (SEQ ID |
| | | NO: 612) |
| C027.002#50 | lgT3-PS-lgT3-PS-lgT3-PO-mG- | mA-PS-fC-PS-mC-PO-fA- |
| | PO-mC-PO-mA-PO-mU-PO-fU- | PO-mU-PO-mA-PO-mU- |
| | PO-mU-PO-fU-PO-fU-PO-fA- | PO4U-PO-fA-PO-mA-PO- |
| | PO-mU-PO-mU-PO-mA-PO-mA- | mU-PO-mA-PO-mA-PO- |
| | PO-mU-PO-mA-PO-mU-PO-mG- | fA-PO-mA-PO-fA-PO-mU- |
| | PO-mG-PO-mU-PS-lT4-PS-lT4 | PO-mG-PO-mC-PS-mA- |
| | (SEQ ID NO: 607) | PS-mA (SEQ ID NO: 613) |
| C027.002#51 | lgT3-PS-lgT3-PS-lgT3-PO-mG- | mA-PS-fC-PS-mC-PO-fA- |
| | PO-mC-PO-mA-PO-mU-PO-fU- | PO-mU-PO-mA-PO-mU- |
| | PO-mU-PO-fU-PO-fU-PO-fA- | PO-mU-PO-fA-PO-mA- |
| | PO-mU-PO-mU-PO-mA-PO-mA- | PO-mU-PO-mA-PO-mA- |
| | PO-mU-PO-mA-PO-mU-PO-mG- | PO-fA-PO-mA-PO-fA-PO- |
| | PO-mG-PO-mU-PS-lT4-PS-lT4 | mU-PO-mG-PO-mC-PS- |
| | (SEQ ID NO: 607) | mA-PS-mA (SEQ ID |
| | | NO: 614) |
| C027.002#52 | lgT3-PS-lgT3-PS-lgT3-PO-mG- | fA-PS-fC-PS-mC-PO-fA- |
| | PO-mC-PO-mA-PO-mU-PO-fU- | PO-mU-PO-fA-PO-mU- |
| | PO-mU-PO-fU-PO-fU-PO-fA- | PO4U-PO-mA-PO-fA-PO- |
| | PO-mU-PO-mU-PO-mA-PO-mA- | mU-PO-mA-PO-mA-PO- |
| | PO-mU-PO-mA-PO-mU-PO-mG- | fA-PO-mA-PO-fA-PO-mU- |
| | PO-mG-PO-mU-PS-lT4-PS-lT4 | PO-fG-PO-mC-PS-dT-PS- |
| | (SEQ ID NO: 607) | dT (SEQ ID NO: 615) |
| C027.002#53 | lgT3-PS-lgT3-PS-lgT3-PO-mG- | mA-PS-fC-PS-mC-PO-fA- |
| | PO-mC-PO-mA-PO-mU-PO-fU- | PO-mU-PO-mA-PO-mU- |
| | PO-mU-PO-fU-PO-fU-PO-fA- | PO-mU-PO-mA-PO-mA- |
| | PO-mU-PO-mU-PO-mA-PO-mA- | PO-mU-PO-mA-PO-mA- |
| | PO-mU-PO-mA-PO-mU-PO-mG- | PO-fA-PO-mA-PO-fA-PO- |
| | PO-mG-PO-mU-PS-lT4-PS-lT4 | mU-PO-mG-PO-mC-PS- |
| | (SEQ ID NO: 607) | lA-PS-lA (SEQ ID |
| | | NO: 616) |
| C027.002#54 | lgT3-PS-lgT3-PS-lgT3-PO-mG- | mA-PS-fC-PS-mC-PO-mA- |
| | PO-mC-PO-mA-PO-mU-PO-fU- | PO-mU-PO-fA-PO-mU- |
| | PO-mU-PO-fU-PO-fU-PO-fA- | PO-mU-PO-mA-PO-mA- |
| | PO-mU-PO-mU-PO-mA-PO-mA- | PO-mU-PO-mA-PO-mA- |
| | PO-mU-PO-mA-PO-mU-PO-mG- | PO-fA-PO-mA-PO-fA-PO- |
| | PO-mG-PO-mU-PS-lT4-PS-lT4 | mU-PO-mG-PO-mC-PS- |
| | (SEQ ID NO: 607) | lA-PS-lA (SEQ ID |
| | | NO: 617) |
| C027.002#55 | lgT3-PS-lgT3-PS-lgT3-PO-mG- | mA-PS-fC-PS-mC-PO-fA- |
| | PO-mC-PO-mA-PO-mU-PO-fU- | PO-mU-PO-mA-PO-mU- |
| | PO-mU-PO-fU-PO-fU-PO-fA- | PO4U-PO-fA-PO-mA-PO- |
| | PO-mU-PO-mU-PO-mA-PO-mA- | mU-PO-mA-PO-mA-PO- |
| | PO-mU-PO-mA-PO-mU-PO-mG- | fA-PO-mA-PO-fA-PO-mU- |
| | PO-mG-PO-mU-PS-lT4-PS-lT4 | PO-mG-PO-mC-PS-lA-PS- |
| | (SEQ ID NO: 607) | lA (SEQ ID NO: 618) |
| C027.002#56 | lgT3-PS-lgT3-PS-lgT3-PO-mG- | mA-PS-fC-PS-mC-PO-fA- |
| | PO-mC-PO-mA-PO-mU-PO-fU- | PO-mU-PO-mA-PO-mU- |
| | PO-mU-PO-fU-PO-fU-PO-fA- | PO-mU-PO-fA-PO-mA- |
| | PO-mU-PO-mU-PO-mA-PO-mA- | PO-mU-PO-mA-PO-mA- |
| | PO-mU-PO-mA-PO-mU-PO-mG- | PO-fA-PO-mA-PO-fA-PO- |
| | PO-mG-PO-mU-PS-lT4-PS- | mU-PO-mG-PO-mC-PS- |
| | lT4 (SEQ ID NO: 607) | lA-PS-lA (SEQ ID |
| | | NO: 619) |
| C027.002#57 | lgT3-PO-lgT3-PO-lgT3-PO-lG- | mA-PS-fC-PS-mC-PO-fA- |
| | PO-lC-PO-mA-PO-mU-PO-fU- | PO-mU-PO-mA-PO-mU- |
| | PO-mU-PO-fU-PO-fU-PO-fA- | PO-mU-PO-mA-PO-mA- |
| | PO-mU-PO-mU-PO-mA-PO-mA- | PO-mU-PO-mA-PO-mA- |
| | PO-mU-PO-mA-PO-mU-PO-mG- | PO-fA-PO-mA-PO-fA-PO- |
| | PO-mG-PO-mU-PO-lT4-PO-lT4 | mU-PO-mG-PO-mC-PS- |
| | (SEQ ID NO: 608) | mA-PS-mA (SEQ ID |
| | | NO: 611) |
| C027.002#58 | lgT3-PO-lgT3-PO-lgT3-PO-lG- | mA-PS-fC-PS-mC-PO-mA- |
| | PO-lC-PO-mA-PO-mU-PO-fU- | PO-mU-PO-fA-PO-mU- |
| | PO-mU-PO-fU-PO-fU-PO-fA- | PO-mU-PO-mA-PO-mA- |
| | PO-mU-PO-mU-PO-mA-PO-mA- | PO-mU-PO-mA-PO-mA- |
| | PO-mU-PO-mA-PO-mU-PO-mG- | PO-fA-PO-mA-PO-fA-PO- |
| | PO-mG-PO-mU-PO-lT4-PO-lT4 | mU-PO-mG-PO-mC-PS- |
| | (SEQ ID NO: 608) | mA-PS-mA (SEQ ID |
| | | NO: 612) |
| C027.002#59 | lgT3-PO-lgT3-PO-lgT3-PO-lG- | mA-PS-fC-PS-mC-PO-fA- |
| | PO-lC-PO-mA-PO-mU-PO-fU- | PO-mU-PO-mA-PO-mU- |
| | PO-mU-PO-fU-PO-fU-PO-fA- | PO4U-PO-fA-PO-mA-PO- |
| | PO-mU-PO-mU-PO-mA-PO-mA- | mU-PO-mA-PO-mA-PO- |
| | PO-mU-PO-mA-PO-mU-PO-mG- | fA-PO-mA-PO-fA-PO-mU- |
| | PO-mG-PO-mU-PO-lT4-PO-lT4 | PO-mG-PO-mC-PS-mA- |
| | (SEQ ID NO: 608) | PS-mA (SEQ ID NO: 613) |
| C027.002#60 | lgT3-PO-lgT3-PO-lgT3-PO-lG- | mA-PS-fC-PS-mC-PO-fA- |
| | PO-lC-PO-mA-PO-mU-PO-fU- | PO-mU-PO-mA-PO-mU- |
| | PO-mU-PO-fU-PO-fU-PO-fA- | PO-mU-PO-fA-PO-mA- |
| | PO-mU-PO-mU-PO-mA-PO-mA- | PO-mU-PO-mA-PO-mA- |
| | PO-mU-PO-mA-PO-mU-PO-mG- | PO-fA-PO-mA-PO-fA-PO- |
| | PO-mG-PO-mU-PO-lT4-PO-lT4 | mU-PO-mG-PO-mC-PS- |
| | (SEQ ID NO: 608) | mA-PS-mA (SEQ ID |
| | | NO: 614) |
| C027.002#61 | lgT3-PO-lgT3-PO-lgT3-PO-lG- | fA-PS-fC-PS-mC-PO-fA- |
| | PO-lC-PO-mA-PO-mU-PO-fU- | PO-mU-PO-fA-PO-mU- |
| | PO-mU-PO-fU-PO-fU-PO-fA- | PO4U-PO-mA-PO-fA-PO- |
| | PO-mU-PO-mU-PO-mA-PO-mA- | mU-PO-mA-PO-mA-PO- |
| | PO-mU-PO-mA-PO-mU-PO-mG- | fA-PO-mA-PO-fA-PO-mU- |
| | PO-mG-PO-mU-PO-lT4-PO-lT4 | PO-fG-PO-mC-PS-dT-PS- |
| | (SEQ ID NO: 608) | dT (SEQ ID NO: 615) |
| C027.002#62 | lgT3-PS-lgT3-PS-lgT3-PO-lG- | mA-PS-fC-PS-mC-PO-fA- |
| | PO-lC-PO-mA-PO-mU-PO-fU- | PO-mU-PO-mA-PO-mU- |
| | PO-mU-PO-fU-PO-fU-PO-fA- | PO-mU-PO-mA-PO-mA- |
| | PO-mU-PO-mU-PO-mA-PO-mA- | PO-mU-PO-mA-PO-mA- |
| | PO-mU-PO-mA-PO-mU-PO-mG- | PO-fA-PO-mA-PO-fA-PO- |
| | PO-mG-PO-mU-PS-lT4-PS-lT4 | mU-PO-mG-PO-mC-PS- |
| | (SEQ ID NO: 609) | mA-PS-mA (SEQ ID |
| | | NO: 611) |
| C027.002#63 | lgT3-PS-lgT3-PS-lgT3-PO-lG- | mA-PS-fC-PS-mC-PO-mA- |
| | PO-lC-PO-mA-PO-mU-PO-fU- | PO-mU-PO-fA-PO-mU- |
| | PO-mU-PO-fU-PO-fU-PO-fA- | PO-mU-PO-mA-PO-mA- |
| | PO-mU-PO-mU-PO-mA-PO-mA- | PO-mU-PO-mA-PO-mA- |
| | PO-mU-PO-mA-PO-mU-PO-mG- | PO-fA-PO-mA-PO-fA-PO- |
| | PO-mG-PO-mU-PS-lT4-PS-lT4 | mU-PO-mG-PO-mC-PS- |
| | (SEQ ID NO: 609) | mA-PS-mA (SEQ ID |
| | | NO: 612) |
| C027.002#64 | lgT3-PS-lgT3-PS-lgT3-PO-lG- | mA-PS-fC-PS-mC-PO-fA- |
| | PO-lC-PO-mA-PO-mU-PO-fU- | PO-mU-PO-mA-PO-mU- |
| | PO-mU-PO-fU-PO-fU-PO-fA- | PO4U-PO-fA-PO-mA-PO- |
| | PO-mU-PO-mU-PO-mA-PO-mA- | mU-PO-mA-PO-mA-PO- |
| | PO-mU-PO-mA-PO-mU-PO-mG- | fA-PO-mA-PO-fA-PO-mU- |
| | PO-mG-PO-mU-PS-lT4-PS-lT4 | PO-mG-PO-mC-PS-mA- |
| | (SEQ ID NO: 609) | PS-mA (SEQ ID NO: 613) |
| C027.002#65 | lgT3-PS-lgT3-PS-lgT3-PO-lG- | mA-PS-fC-PS-mC-PO-fA- |
| | PO-lC-PO-mA-PO-mU-PO-fU- | PO-mU-PO-mA-PO-mU- |
| | PO-mU-PO-fU-PO-fU-PO-fA- | PO-mU-PO-fA-PO-mA- |
| | PO-mU-PO-mU-PO-mA-PO-mA- | PO-mU-PO-mA-PO-mA- |
| | PO-mU-PO-mA-PO-mU-PO-mG- | PO-fA-PO-mA-PO-fA-PO- |
| | PO-mG-PO-mU-PS-lT4-PS-lT4 | mU-PO-mG-PO-mC-PS- |
| | (SEQ ID NO: 609) | mA-PS-mA (SEQ ID |
| | | NO: 614) |
| C027.002#66 | lgT3-PS-lgT3-PS-lgT3-PO-lG- | fA-PS-fC-PS-mC-PO-fA- |
| | PO-lC-PO-mA-PO-mU-PO-fU- | PO-mU-PO-fA-PO-mU- |
| | PO-mU-PO-fU-PO-fU-PO-fA- | PO4U-PO-mA-PO-fA-PO- |
| | PO-mU-PO-mU-PO-mA-PO-mA- | mU-PO-mA-PO-mA-PO- |
| | PO-mU-PO-mA-PO-mU-PO-mG- | fA-PO-mA-PO-fA-PO-mU- |
| | PO-mG-PO-mU-PS-lT4-PS-lT4 | PO-fG-PO-mC-PS-dT-PS- |
| | (SEQ ID NO: 609) | dT (SEQ ID NO: 615) |
| C027.003#01 | lgT3-PO-lgT3-PO-lgT3-PO-mU- | mA-PS-fA-PS-mA-PO-fG- |
| | PO-mU-PO-mA-PO-mU-PO-fU- | PO-mU-PO-mC-PO-mA- |
| | PO-mA-PO-fA-PO-fU-PO-fA- | PO-mC-PO-mC-PO-mA- |
| | PO-mU-PO-mG-PO-mG-PO-mU- | PO-mU-PO-mA-PO-mU- |
| | PO-mG-PO-mA-PO-mC-PO-mU- | PO4U-PO-mA-PO-fA-PO- |
| | PS-mU-PS-mU (SEQ ID NO: 621) | mU-PO-mA-PO-mA-PS- |
| | | mA-PS-mA (SEQ ID |
| | | NO: 632) |
| C027.003#02 | lgT3-PO-lgT3-PO-lgT3-PO-mU- | mA-PS-fA-PS-mA-PO- |
| | PO-mU-PO-mA-PO-mU-PO-fU- | mG-PO-mU-PO-fC-PO- |
| | PO-mA-PO-fA-PO-fU-PO-fA- | mA-PO-mC-PO-mC-PO- |
| | PO-mU-PO-mG-PO-mG-PO-mU- | mA-PO-mU-PO-mA-PO- |
| | PO-mG-PO-mA-PO-mC-PO-mU- | mU-PO4U-PO-mA-PO-fA- |
| | PS-mU-PS-mU (SEQ ID NO: 621) | PO-mU-PO-mA-PO-mA- |
| | | PS-mA-PS-mA (SEQ ID |
| | | NO: 633) |
| C027.003#03 | lgT3-PO-lgT3-PO-lgT3-PO-mU- | mA-PS-fA-PS-mA-PO-fG- |
| | PO-mU-PO-mA-PO-mU-PO-fU- | PO-mU-PO-mC-PO-mA- |
| | PO-mA-PO-fA-PO-fU-PO-fA- | PO-fC-PO-fC-PO-mA-PO- |
| | PO-mU-PO-mG-PO-mG-PO-mU- | mU-PO-mA-PO-mU-PO- |
| | PO-mG-PO-mA-PO-mC-PO-mU- | fU-PO-mA-PO-fA-PO-mU- |
| | PS-mU-PS-mU (SEQ ID NO: 621) | PO-mA-PO-mA-PS-mA- |
| | | PS-mA (SEQ ID NO: 634) |
| C027.003#04 | lgT3-PO-lgT3-PO-lgT3-PO-mU- | mA-PS-fA-PS-mA-PO-fG- |
| | PO-mU-PO-mA-PO-mU-PO-fU- | PO-mU-PO-mC-PO-mA- |
| | PO-mA-PO-fA-PO-fU-PO-fA- | PO-mC-PO-fC-PO-mA- |
| | PO-mU-PO-mG-PO-mG-PO-mU- | PO-mU-PO-mA-PO-mU- |
| | PO-mG-PO-mA-PO-mC-PO-mU- | PO4U-PO-mA-PO-fA-PO- |
| | PS-mU-PS-mU (SEQ ID NO: 621) | mU-PO-mA-PO-mA-PS- |
| | | mA-PS-mA (SEQ ID |
| | | NO: 635) |
| C027.003#05 | lgT3-PO-lgT3-PO-lgT3-PO-mU- | fA-PS-fA-PS-mA-PO-fG- |
| | PO-mU-PO-mA-PO-mU-PO-fU- | PO-mU-PO-fC-PO-mA- |
| | PO-mA-PO-fA-PO-fU-PO-fA- | PO-fC-PO-mC-PO-fA-PO- |
| | PO-mU-PO-mG-PO-mG-PO-mU- | mU-PO-mA-PO-mU-PO- |
| | PO-mG-PO-mA-PO-mC-PO-mU- | fU-PO-mA-PO-fA-PO-mU- |
| | PS-mU-PS-mU (SEQ ID NO: 621) | PO-fA-PO-mA-PS-dT-PS- |
| | | dT (SEQ ID NO: 636) |
| C027.003#06 | lgT3-PO-lgT3-PO-lgT3-PO-lT- | mA-PS-fA-PS-mA-PO-fG- |
| | PO-lT-PO-mA-PO-mU-PO-fU- | PO-mU-PO-mC-PO-mA- |
| | PO-mA-PO-fA-PO-fU-PO-fA- | PO-mC-PO-mC-PO-mA- |
| | PO-mU-PO-mG-PO-mG-PO-mU- | PO-mU-PO-mA-PO-mU- |
| | PO-mG-PO-mA-PO-mC-PO-mU- | PO4U-PO-mA-PO-fA-PO- |
| | PS-mU-PS-mU (SEQ ID NO: 622) | mU-PO-mA-PO-mA-PS- |
| | | mA-PS-mA (SEQ ID |
| | | NO: 632) |
| C027.003#07 | lgT3-PO-lgT3-PO-lgT3-PO-lT- | mA-PS-fA-PS-mA-PO- |
| | PO-lT-PO-mA-PO-mU-PO-fU- | mG-PO-mU-PO-fC-PO- |
| | PO-mA-PO-fA-PO-fU-PO-fA- | mA-PO-mC-PO-mC-PO- |
| | PO-mU-PO-mG-PO-mG-PO-mU- | mA-PO-mU-PO-mA-PO- |
| | PO-mG-PO-mA-PO-mC-PO-mU- | mU-PO4U-PO-mA-PO-fA- |
| | PS-mU-PS-mU (SEQ ID NO: 622) | PO-mU-PO-mA-PO-mA- |
| | | PS-mA-PS-mA (SEQ ID |
| | | NO: 633) |
| C027.003#08 | lgT3-PO-lgT3-PO-lgT3-PO-lT- | mA-PS-fA-PS-mA-PO-fG- |
| | PO-lT-PO-mA-PO-mU-PO-fU- | PO-mU-PO-mC-PO-mA- |
| | PO-mA-PO-fA-PO-fU-PO-fA- | PO-fC-PO-fC-PO-mA-PO- |
| | PO-mU-PO-mG-PO-mG-PO-mU- | mU-PO-mA-PO-mU-PO- |
| | PO-mG-PO-mA-PO-mC-PO-mU- | fU-PO-mA-PO-fA-PO-mU- |
| | PS-mU-PS-mU (SEQ ID NO: 622) | PO-mA-PO-mA-PS-mA- |
| | | PS-mA (SEQ ID NO: 634) |
| C027.003#09 | lgT3-PO-lgT3-PO-lgT3-PO-lT- | mA-PS-fA-PS-mA-PO-fG- |
| | PO-lT-PO-mA-PO-mU-PO-fU- | PO-mU-PO-mC-PO-mA- |
| | PO-mA-PO-fA-PO-fU-PO-fA- | PO-mC-PO-fC-PO-mA- |
| | PO-mU-PO-mG-PO-mG-PO-mU- | PO-mU-PO-mA-PO-mU- |
| | PO-mG-PO-mA-PO-mC-PO-mU- | PO4U-PO-mA-PO-fA-PO- |
| | PS-mU-PS-mU (SEQ ID NO: 622) | mU-PO-mA-PO-mA-PS- |
| | | mA-PS-mA (SEQ ID |
| | | NO: 635) |
| C027.003#10 | lgT3-PO-lgT3-PO-lgT3-PO-lT- | fA-PS-fA-PS-mA-PO-fG- |
| | PO-lT-PO-mA-PO-mU-PO-fU- | PO-mU-PO-fC-PO-mA- |
| | PO-mA-PO-fA-PO-fU-PO-fA- | PO-fC-PO-mC-PO-fA-PO- |
| | PO-mU-PO-mG-PO-mG-PO-mU- | mU-PO-mA-PO-mU-PO- |
| | PO-mG-PO-mA-PO-mC-PO-mU- | fU-PO-mA-PO-fA-PO-mU- |
| | PS-mU-PS-mU (SEQ ID NO: 622) | PO-fA-PO-mA-PS-dT-PS- |
| | | dT (SEQ ID NO: 636) |
| C027.003#11 | lgT3-PO-lgT3-PO-lgT3-PO-mU- | mA-PS-fA-PS-mA-PO-fG- |
| | PO-mU-PO-mA-PO-mU-PO-fU- | PO-mU-PO-mC-PO-mA- |
| | PO-mA-PO-fA-PO-fU-PO-fA- | PO-mC-PO-mC-PO-mA- |
| | PO-mU-PO-mG-PO-mG-PO-mU- | PO-mU-PO-mA-PO-mU- |
| | PO-mG-PO-mA-PO-mC-PO-mU- | PO4U-PO-mA-PO-fA-PO- |
| | PO-lT4-PO-lT4 (SEQ ID | mU-PO-mA-PO-mA-PS- |
| | NO: 623) | mA-PS-mA (SEQ ID |
| | | NO: 632) |
| C027.003#12 | lgT3-PO-lgT3-PO-lgT3-PO-mU- | mA-PS-fA-PS-mA-PO- |
| | PO-mU-PO-mA-PO-mU-PO-fU- | mG-PO-mU-PO-fC-PO- |
| | PO-mA-PO-fA-PO-fU-PO-fA- | mA-PO-mC-PO-mC-PO- |
| | PO-mU-PO-mG-PO-mG-PO-mU- | mA-PO-mU-PO-mA-PO- |
| | PO-mG-PO-mA-PO-mC-PO-mU- | mU-PO4U-PO-mA-PO-fA- |
| | PO-lT4-PO-lT4 (SEQ ID | PO-mU-PO-mA-PO-mA- |
| | NO: 623) | PS-mA-PS-mA (SEQ ID |
| | | NO: 633) |
| C027.003#13 | lgT3-PO-lgT3-PO-lgT3-PO-mU- | mA-PS-fA-PS-mA-PO-fG- |
| | PO-mU-PO-mA-PO-mU-PO-fU- | PO-mU-PO-mC-PO-mA- |
| | PO-mA-PO-fA-PO-fU-PO-fA- | PO-fC-PO-fC-PO-mA-PO- |
| | PO-mU-PO-mG-PO-mG-PO-mU- | mU-PO-mA-PO-mU-PO- |
| | PO-mG-PO-mA-PO-mC-PO-mU- | fU-PO-mA-PO-fA-PO-mU- |
| | PO-lT4-PO-lT4 (SEQ ID | PO-mA-PO-mA-PS-mA- |
| | NO: 623) | PS-mA (SEQ ID NO: 634) |
| C027.003#14 | lgT3-PO-lgT3-PO-lgT3-PO-mU- | mA-PS-fA-PS-mA-PO-fG- |
| | PO-mU-PO-mA-PO-mU-PO-fU- | PO-mU-PO-mC-PO-mA- |
| | PO-mA-PO-fA-PO-fU-PO-fA- | PO-mC-PO-fC-PO-mA- |
| | PO-mU-PO-mG-PO-mG-PO-mU- | PO-mU-PO-mA-PO-mU- |
| | PO-mG-PO-mA-PO-mC-PO-mU- | PO4U-PO-mA-PO-fA-PO- |
| | PO-lT4-PO-lT4 (SEQ ID | mU-PO-mA-PO-mA-PS- |
| | NO: 623) | mA-PS-mA (SEQ ID |
| | | NO: 635) |
| C027.003#15 | lgT3-PO-lgT3-PO-lgT3-PO-mU- | fA-PS-fA-PS-mA-PO-fG- |
| | PO-mU-PO-mA-PO-mU-PO-fU- | PO-mU-PO-fC-PO-mA- |
| | PO-mA-PO-fA-PO-fU-PO-fA- | PO-fC-PO-mC-PO-fA-PO- |
| | PO-mU-PO-mG-PO-mG-PO-mU- | mU-PO-mA-PO-mU-PO- |
| | PO-mG-PO-mA-PO-mC-PO-mU- | fU-PO-mA-PO-fA-PO-mU- |
| | PO-lT4-PO-lT4 (SEQ ID | PO-fA-PO-mA-PS-dT-PS- |
| | NO: 623) | dT (SEQ ID NO: 636) |
| C027.003#16 | lgT3-PO-lgT3-PO-lgT3-PO-mU- | mA-PS-fA-PS-mA-PO-fG- |
| | PO-mU-PO-mA-PO-mU-PO-fU- | PO-mU-PO-mC-PO-mA- |
| | PO-mA-PO-fA-PO-fU-PO-fA- | PO-mC-PO-mC-PO-mA- |
| | PO-mU-PO-mG-PO-mG-PO-mU- | PO-mU-PO-mA-PO-mU- |
| | PO-mG-PO-mA-PO-mC-PO-mU- | PO4U-PO-mA-PO-fA-PO- |
| | PO-lT4-PO-lT4 (SEQ ID | mU-PO-mA-PO-mA-PS- |
| | NO: 623) | lA-PS-lA (SEQ ID |
| | | NO: 637) |
| C027.003#17 | lgT3-PO-lgT3-PO-lgT3-PO-mU- | mA-PS-fA-PS-mA-PO- |
| | PO-mU-PO-mA-PO-mU-PO-fU- | mG-PO-mU-PO-fC-PO- |
| | PO-mA-PO-fA-PO-fU-PO-fA- | mA-PO-mC-PO-mC-PO- |
| | PO-mU-PO-mG-PO-mG-PO-mU- | mA-PO-mU-PO-mA-PO- |
| | PO-mG-PO-mA-PO-mC-PO-mU- | mU-PO4U-PO-mA-PO-fA- |
| | PO-lT4-PO-lT4 (SEQ ID | PO-mU-PO-mA-PO-mA- |
| | NO: 623) | PS-lA-PS-lA (SEQ ID |
| | | NO: 638) |
| C027.003#18 | lgT3-PO-lgT3-PO-lgT3-PO-mU- | mA-PS-fA-PS-mA-PO-fG- |
| | PO-mU-PO-mA-PO-mU-PO-fU- | PO-mU-PO-mC-PO-mA- |
| | PO-mA-PO-fA-PO-fU-PO-fA- | PO-fC-PO-fC-PO-mA-PO- |
| | PO-mU-PO-mG-PO-mG-PO-mU- | mU-PO-mA-PO-mU-PO- |
| | PO-mG-PO-mA-PO-mC-PO-mU- | fU-PO-mA-PO-fA-PO-mU- |
| | PO-lT4-PO-lT4 (SEQ ID | PO-mA-PO-mA-PS-lA-PS- |
| | NO: 623) | lA (SEQ ID NO: 639) |
| C027.003#19 | lgT3-PO-lgT3-PO-lgT3-PO-mU- | mA-PS-fA-PS-mA-PO-fG- |
| | PO-mU-PO-mA-PO-mU-PO-fU- | PO-mU-PO-mC-PO-mA- |
| | PO-mA-PO-fA-PO-fU-PO-fA- | PO-mC-PO-fC-PO-mA- |
| | PO-mU-PO-mG-PO-mG-PO-mU- | PO-mU-PO-mA-PO-mU- |
| | PO-mG-PO-mA-PO-mC-PO-mU- | PO4U-PO-mA-PO-fA-PO- |
| | PO-lT4-PO-lT4 (SEQ ID | mU-PO-mA-PO-mA-PS- |
| | NO: 623) | lA-PS-lA (SEQ ID |
| | | NO: 640) |
| C027.003#20 | lgT3-PS-lgT3-PS-lgT3-PO-mU- | mA-PS-fA-PS-mA-PO-fG- |
| | PO-mU-PO-mA-PO-mU-PO-fU- | PO-mU-PO-mC-PO-mA- |
| | PO-mA-PO-fA-PO-fU-PO-fA- | PO-mC-PO-mC-PO-mA- |
| | PO-mU-PO-mG-PO-mG-PO-mU- | PO-mU-PO-mA-PO-mU- |
| | PO-mG-PO-mA-PO-mC-PO-mU- | PO4U-PO-mA-PO-fA-PO- |
| | PS-lT4-PS-lT4 (SEQ ID NO: 624) | mU-PO-mA-PO-mA-PS- |
| | | mA-PS-mA (SEQ ID |
| | | NO: 632) |
| C027.003#21 | lgT3-PS-lgT3-PS-lgT3-PO-mU- | mA-PS-fA-PS-mA-PO- |
| | PO-mU-PO-mA-PO-mU-PO-fU- | mG-PO-mU-PO-fC-PO- |
| | PO-mA-PO-fA-PO-fU-PO-fA- | mA-PO-mC-PO-mC-PO- |
| | PO-mU-PO-mG-PO-mG-PO-mU- | mA-PO-mU-PO-mA-PO- |
| | PO-mG-PO-mA-PO-mC-PO-mU- | mU-PO4U-PO-mA-PO-fA- |
| | PS-lT4-PS-lT4 (SEQ ID NO: 624) | PO-mU-PO-mA-PO-mA- |
| | | PS-mA-PS-mA (SEQ ID |
| | | NO: 633) |
| C027.003#22 | lgT3-PS-lgT3-PS-lgT3-PO-mU- | mA-PS-fA-PS-mA-PO-fG- |
| | PO-mU-PO-mA-PO-mU-PO-fU- | PO-mU-PO-mC-PO-mA- |
| | PO-mA-PO-fA-PO-fU-PO-fA- | PO-fC-PO-fC-PO-mA-PO- |
| | PO-mU-PO-mG-PO-mG-PO-mU- | mU-PO-mA-PO-mU-PO- |
| | PO-mG-PO-mA-PO-mC-PO-mU- | fU-PO-mA-PO-fA-PO-mU- |
| | PS-lT4-PS-lT4 (SEQ ID NO: 624) | PO-mA-PO-mA-PS-mA- |
| | | PS-mA (SEQ ID NO: 634) |
| C027.003#23 | lgT3-PS-lgT3-PS-lgT3-PO-mU- | mA-PS-fA-PS-mA-PO-fG- |
| | PO-mU-PO-mA-PO-mU-PO-fU- | PO-mU-PO-mC-PO-mA- |
| | PO-mA-PO-fA-PO-fU-PO-fA- | PO-mC-PO-fC-PO-mA- |
| | PO-mU-PO-mG-PO-mG-PO-mU- | PO-mU-PO-mA-PO-mU- |
| | PO-mG-PO-mA-PO-mC-PO-mU- | PO4U-PO-mA-PO-fA-PO- |
| | PS-lT4-PS-lT4 (SEQ ID NO: 624) | mU-PO-mA-PO-mA-PS- |
| | | mA-PS-mA (SEQ ID |
| | | NO: 635) |
| C027.003#24 | lgT3-PS-lgT3-PS-lgT3-PO-mU- | fA-PS-fA-PS-mA-PO-fG- |
| | PO-mU-PO-mA-PO-mU-PO-fU- | PO-mU-PO-fC-PO-mA- |
| | PO-mA-PO-fA-PO-fU-PO-fA- | PO-fC-PO-mC-PO-fA-PO- |
| | PO-mU-PO-mG-PO-mG-PO-mU- | mU-PO-mA-PO-mU-PO- |
| | PO-mG-PO-mA-PO-mC-PO-mU- | fU-PO-mA-PO-fA-PO-mU- |
| | PS-lT4-PS-lT4 (SEQ ID NO: 624) | PO-fA-PO-mA-PS-dT-PS- |
| | | dT (SEQ ID NO: 636) |
| C027.003#25 | lgT3-PS-lgT3-PS-lgT3-PO-mU- | mA-PS-fA-PS-mA-PO-fG- |
| | PO-mU-PO-mA-PO-mU-PO-fU- | PO-mU-PO-mC-PO-mA- |
| | PO-mA-PO-fA-PO-fU-PO-fA- | PO-mC-PO-mC-PO-mA- |
| | PO-mU-PO-mG-PO-mG-PO-mU- | PO-mU-PO-mA-PO-mU- |
| | PO-mG-PO-mA-PO-mC-PO-mU- | PO4U-PO-mA-PO-fA-PO- |
| | PS-lT4-PS-lT4 (SEQ ID NO: 624) | mU-PO-mA-PO-mA-PS- |
| | | lA-PS-lA (SEQ ID |
| | | NO: 637) |
| C027.003#26 | lgT3-PS-lgT3-PS-lgT3-PO-mU- | mA-PS-fA-PS-mA-PO- |
| | PO-mU-PO-mA-PO-mU-PO-fU- | mG-PO-mU-PO-fC-PO- |
| | PO-mA-PO-fA-PO-fU-PO-fA- | mA-PO-mC-PO-mC-PO- |
| | PO-mU-PO-mG-PO-mG-PO-mU- | mA-PO-mU-PO-mA-PO- |
| | PO-mG-PO-mA-PO-mC-PO-mU- | mU-PO4U-PO-mA-PO-fA- |
| | PS-lT4-PS-lT4 (SEQ ID NO: 624) | PO-mU-PO-mA-PO-mA- |
| | | PS-lA-PS-lA (SEQ ID |
| | | NO: 638) |
| C027.003#27 | lgT3-PS-lgT3-PS-lgT3-PO-mU- | mA-PS-fA-PS-mA-PO-fG- |
| | PO-mU-PO-mA-PO-mU-PO-fU- | PO-mU-PO-mC-PO-mA- |
| | PO-mA-PO-fA-PO-fU-PO-fA- | PO-fC-PO-fC-PO-mA-PO- |
| | PO-mU-PO-mG-PO-mG-PO-mU- | mU-PO-mA-PO-mU-PO- |
| | PO-mG-PO-mA-PO-mC-PO-mU- | fU-PO-mA-PO-fA-PO-mU- |
| | PS-lT4-PS-lT4 (SEQ ID NO: 624) | PO-mA-PO-mA-PS-lA-PS- |
| | | lA (SEQ ID NO: 639) |
| C027.003#28 | lgT3-PS-lgT3-PS-lgT3-PO-mU- | mA-PS-fA-PS-mA-PO-fG- |
| | PO-mU-PO-mA-PO-mU-PO-fU- | PO-mU-PO-mC-PO-mA- |
| | PO-mA-PO-fA-PO-fU-PO-fA- | PO-mC-PO-fC-PO-mA- |
| | PO-mU-PO-mG-PO-mG-PO-mU- | PO-mU-PO-mA-PO-mU- |
| | PO-mG-PO-mA-PO-mC-PO-mU- | PO4U-PO-mA-PO-fA-PO- |
| | PS-lT4-PS-lT4 (SEQ ID NO: 624) | mU-PO-mA-PO-mA-PS- |
| | | lA-PS-lA (SEQ ID |
| | | NO: 640) |
| C027.003#29 | lgT3-PO-lgT3-PO-lgT3-PO-lT- | mA-PS-fA-PS-mA-PO-fG- |
| | PO-lT-PO-mA-PO-mU-PO-fU- | PO-mU-PO-mC-PO-mA- |
| | PO-mA-PO-fA-PO-fU-PO-fA- | PO-mC-PO-mC-PO-mA- |
| | PO-mU-PO-mG-PO-mG-PO-mU- | PO-mU-PO-mA-PO-mU- |
| | PO-mG-PO-mA-PO-mC-PO-mU- | PO4U-PO-mA-PO-fA-PO- |
| | PO-lT4-PO-lT4 (SEQ ID | mU-PO-mA-PO-mA-PS- |
| | NO: 625) | mA-PS-mA (SEQ ID |
| | | NO: 632) |
| C027.003#30 | lgT3-PO-lgT3-PO-lgT3-PO-lT- | mA-PS-fA-PS-mA-PO- |
| | PO-lT-PO-mA-PO-mU-PO-fU- | mG-PO-mU-PO-fC-PO- |
| | PO-mA-PO-fA-PO-fU-PO-fA- | mA-PO-mC-PO-mC-PO- |
| | PO-mU-PO-mG-PO-mG-PO-mU- | mA-PO-mU-PO-mA-PO- |
| | PO-mG-PO-mA-PO-mC-PO-mU- | mU-PO4U-PO-mA-PO-fA- |
| | PO-lT4-PO-lT4 (SEQ ID | PO-mU-PO-mA-PO-mA- |
| | NO: 625) | PS-mA-PS-mA (SEQ ID |
| | | NO: 633) |
| C027.003#31 | lgT3-PO-lgT3-PO-lgT3-PO-lT- | mA-PS-fA-PS-mA-PO-fG- |
| | PO-lT-PO-mA-PO-mU-PO-fU- | PO-mU-PO-mC-PO-mA- |
| | PO-mA-PO-fA-PO-fU-PO-fA- | PO-fC-PO-fC-PO-mA-PO- |
| | PO-mU-PO-mG-PO-mG-PO-mU- | mU-PO-mA-PO-mU-PO- |
| | PO-mG-PO-mA-PO-mC-PO-mU- | fU-PO-mA-PO-fA-PO-mU- |
| | PO-lT4-PO-lT4 (SEQ ID | PO-mA-PO-mA-PS-mA- |
| | NO: 625) | PS-mA (SEQ ID NO: 634) |
| C027.003#32 | lgT3-PO-lgT3-PO-lgT3-PO-lT- | mA-PS-fA-PS-mA-PO-fG- |
| | PO-lT-PO-mA-PO-mU-PO-fU- | PO-mU-PO-mC-PO-mA- |
| | PO-mA-PO-fA-PO-fU-PO-fA- | PO-mC-PO-fC-PO-mA- |
| | PO-mU-PO-mG-PO-mG-PO-mU- | PO-mU-PO-mA-PO-mU- |
| | PO-mG-PO-mA-PO-mC-PO-mU- | PO4U-PO-mA-PO-fA-PO- |
| | PO-lT4-PO-lT4 (SEQ ID | mU-PO-mA-PO-mA-PS- |
| | NO: 625) | mA-PS-mA (SEQ ID |
| | | NO: 635) |
| C027.003#33 | lgT3-PO-lgT3-PO-lgT3-PO-lT- | fA-PS-fA-PS-mA-PO-fG- |
| | PO-lT-PO-mA-PO-mU-PO-fU- | PO-mU-PO-fC-PO-mA- |
| | PO-mA-PO-fA-PO-fU-PO-fA- | PO-fC-PO-mC-PO-fA-PO- |
| | PO-mU-PO-mG-PO-mG-PO-mU- | mU-PO-mA-PO-mU-PO- |
| | PO-mG-PO-mA-PO-mC-PO-mU- | fU-PO-mA-PO-fA-PO-mU- |
| | PO-lT4-PO-lT4 (SEQ ID | PO-fA-PO-mA-PS-dT-PS- |
| | NO: 625) | dT (SEQ ID NO: 636) |
| C027.003#34 | lgT3-PS-lgT3-PS-lgT3-PO-lT- | mA-PS-fA-PS-mA-PO-fG- |
| | PO-lT-PO-mA-PO-mU-PO-fU- | PO-mU-PO-mC-PO-mA- |
| | PO-mA-PO-fA-PO-fU-PO-fA- | PO-mC-PO-mC-PO-mA- |
| | PO-mU-PO-mG-PO-mG-PO-mU- | PO-mU-PO-mA-PO-mU- |
| | PO-mG-PO-mA-PO-mC-PO-mU- | PO4U-PO-mA-PO-fA-PO- |
| | PS-lT4-PS-lT4 (SEQ ID NO: 626) | mU-PO-mA-PO-mA-PS- |
| | | mA-PS-mA (SEQ ID |
| | | NO: 632) |
| C027.003#35 | lgT3-PS-lgT3-PS-lgT3-PO-lT- | mA-PS-fA-PS-mA-PO- |
| | PO-lT-PO-mA-PO-mU-PO-fU- | mG-PO-mU-PO-fC-PO- |
| | PO-mA-PO-fA-PO-fU-PO-fA- | mA-PO-mC-PO-mC-PO- |
| | PO-mU-PO-mG-PO-mG-PO-mU- | mA-PO-mU-PO-mA-PO- |
| | PO-mG-PO-mA-PO-mC-PO-mU- | mU-PO4U-PO-mA-PO-fA- |
| | PS-lT4-PS-lT4 (SEQ ID NO: 626) | PO-mU-PO-mA-PO-mA- |
| | | PS-mA-PS-mA (SEQ ID |
| | | NO: 633) |
| C027.003#36 | lgT3-PS-lgT3-PS-lgT3-PO-lT- | mA-PS-fA-PS-mA-PO-fG- |
| | PO-lT-PO-mA-PO-mU-PO-fU- | PO-mU-PO-mC-PO-mA- |
| | PO-mA-PO-fA-PO-fU-PO-fA- | PO-fC-PO-fC-PO-mA-PO- |
| | PO-mU-PO-mG-PO-mG-PO-mU- | mU-PO-mA-PO-mU-PO- |
| | PO-mG-PO-mA-PO-mC-PO-mU- | fU-PO-mA-PO-fA-PO-mU- |
| | PS-lT4-PS-lT4 (SEQ ID NO: 626) | PO-mA-PO-mA-PS-mA- |
| | | PS-mA (SEQ ID NO: 634) |
| C027.003#37 | lgT3-PS-lgT3-PS-lgT3-PO-lT- | mA-PS-fA-PS-mA-PO-fG- |
| | PO-lT-PO-mA-PO-mU-PO-fU- | PO-mU-PO-mC-PO-mA- |
| | PO-mA-PO-fA-PO-fU-PO-fA- | PO-mC-PO-fC-PO-mA- |
| | PO-mU-PO-mG-PO-mG-PO-mU- | PO-mU-PO-mA-PO-mU- |
| | PO-mG-PO-mA-PO-mC-PO-mU- | PO4U-PO-mA-PO-fA-PO- |
| | PS-lT4-PS-lT4 (SEQ ID NO: 626) | mU-PO-mA-PO-mA-PS- |
| | | mA-PS-mA (SEQ ID |
| | | NO: 635) |
| C027.003#38 | lgT3-PS-lgT3-PS-lgT3-PO-lT- | fA-PS-fA-PS-mA-PO-fG- |
| | PO-lT-PO-mA-PO-mU-PO-fU- | PO-mU-PO-fC-PO-mA- |
| | PO-mA-PO-fA-PO-fU-PO-fA- | PO-fC-PO-mC-PO-fA-PO- |
| | PO-mU-PO-mG-PO-mG-PO-mU- | mU-PO-mA-PO-mU-PO- |
| | PO-mG-PO-mA-PO-mC-PO-mU- | fU-PO-mA-PO-fA-PO-mU- |
| | PS-lT4-PS-lT4 (SEQ ID NO: 626) | PO-fA-PO-mA-PS-dT-PS- |
| | | dT (SEQ ID NO: 636) |
| C027.003#39 | lgT3-PO-lgT3-PO-lgT3-PO-mU- | mA-PS-fA-PS-mA-PO-fG- |
| | PO-mU-PO-mA-PO-mU-PO-fU- | PO-mU-PO-mC-PO-mA- |
| | PO-mA-PO-fA-PO-fU-PO-fA- | PO-mC-PO-mC-PO-mA- |
| | PO-mU-PO-mG-PO-mG-PO-mU- | PO-mU-PO-mA-PO-mU- |
| | PO-mG-PO-mA-PO-mC-PO-mU- | PO4U-PO-mA-PO-fA-PO- |
| | PO-mU-PO-mU-PO-lT4-PO-lT4 | mU-PO-mA-PO-mA-PS- |
| | (SEQ ID NO: 627) | mA-PS-mA (SEQ ID |
| | | NO: 632) |
| C027.003#40 | lgT3-PO-lgT3-PO-lgT3-PO-mU- | mA-PS-fA-PS-mA-PO- |
| | PO-mU-PO-mA-PO-mU-PO-fU- | mG-PO-mU-PO-fC-PO- |
| | PO-mA-PO-fA-PO-fU-PO-fA- | mA-PO-mC-PO-mC-PO- |
| | PO-mU-PO-mG-PO-mG-PO-mU- | mA-PO-mU-PO-mA-PO- |
| | PO-mG-PO-mA-PO-mC-PO-mU- | mU-PO4U-PO-mA-PO-fA- |
| | PO-mU-PO-mU-PO-lT4-PO-lT4 | PO-mU-PO-mA-PO-mA- |
| | (SEQ ID NO: 627) | PS-mA-PS-mA (SEQ ID |
| | | NO: 633) |
| C027.003#41 | lgT3-PO-lgT3-PO-lgT3-PO-mU- | mA-PS-fA-PS-mA-PO-fG- |
| | PO-mU-PO-mA-PO-mU-PO-fU- | PO-mU-PO-mC-PO-mA- |
| | PO-mA-PO-fA-PO-fU-PO-fA- | PO-fC-PO-fC-PO-mA-PO- |
| | PO-mU-PO-mG-PO-mG-PO-mU- | mU-PO-mA-PO-mU-PO- |
| | PO-mG-PO-mA-PO-mC-PO-mU- | fU-PO-mA-PO-fA-PO-mU- |
| | PO-mU-PO-mU-PO-lT4-PO-lT4 | PO-mA-PO-mA-PS-mA- |
| | (SEQ ID NO: 627) | PS-mA (SEQ ID NO: 634) |
| C027.003#42 | lgT3-PO-lgT3-PO-lgT3-PO-mU- | mA-PS-fA-PS-mA-PO-fG- |
| | PO-mU-PO-mA-PO-mU-PO-fU- | PO-mU-PO-mC-PO-mA- |
| | PO-mA-PO-fA-PO-fU-PO-fA- | PO-mC-PO-fC-PO-mA- |
| | PO-mU-PO-mG-PO-mG-PO-mU- | PO-mU-PO-mA-PO-mU- |
| | PO-mG-PO-mA-PO-mC-PO-mU- | PO4U-PO-mA-PO-fA-PO- |
| | PO-mU-PO-mU-PO-lT4-PO-lT4 | mU-PO-mA-PO-mA-PS- |
| | (SEQ ID NO: 627) | mA-PS-mA (SEQ ID |
| | | NO: 635) |
| C027.003#43 | lgT3-PO-lgT3-PO-lgT3-PO-mU- | fA-PS-fA-PS-mA-PO-fG- |
| | PO-mU-PO-mA-PO-mU-PO-fU- | PO-mU-PO-fC-PO-mA- |
| | PO-mA-PO-fA-PO-fU-PO-fA- | PO-fC-PO-mC-PO-fA-PO- |
| | PO-mU-PO-mG-PO-mG-PO-mU- | mU-PO-mA-PO-mU-PO- |
| | PO-mG-PO-mA-PO-mC-PO-mU- | fU-PO-mA-PO-fA-PO-mU- |
| | PO-mU-PO-mU-PO-lT4-PO-lT4 | PO-fA-PO-mA-PS-dT-PS- |
| | (SEQ ID NO: 627) | dT (SEQ ID NO: 636) |
| C027.003#44 | lgT3-PO-lgT3-PO-lgT3-PO-mU- | mA-PS-fA-PS-mA-PO-fG- |
| | PO-mU-PO-mA-PO-mU-PO-fU- | PO-mU-PO-mC-PO-mA- |
| | PO-mA-PO-fA-PO-fU-PO-fA- | PO-mC-PO-mC-PO-mA- |
| | PO-mU-PO-mG-PO-mG-PO-mU- | PO-mU-PO-mA-PO-mU- |
| | PO-mG-PO-mA-PO-mC-PO-mU- | PO4U-PO-mA-PO-fA-PO- |
| | PO-mU-PO-mU-PO-lT4-PO-lT4 | mU-PO-mA-PO-mA-PS- |
| | (SEQ ID NO: 627) | lA-PS-lA (SEQ ID |
| | | NO: 637) |
| C027.003#45 | lgT3-PO-lgT3-PO-lgT3-PO-mU- | mA-PS-fA-PS-mA-PO- |
| | PO-mU-PO-mA-PO-mU-PO-fU- | mG-PO-mU-PO-fC-PO- |
| | PO-mA-PO-fA-PO-fU-PO-fA- | mA-PO-mC-PO-mC-PO- |
| | PO-mU-PO-mG-PO-mG-PO-mU- | mA-PO-mU-PO-mA-PO- |
| | PO-mG-PO-mA-PO-mC-PO-mU- | mU-PO4U-PO-mA-PO-fA- |
| | PO-mU-PO-mU-PO-lT4-PO-lT4 | PO-mU-PO-mA-PO-mA- |
| | (SEQ ID NO: 627) | PS-lA-PS-lA (SEQ ID |
| | | NO: 638) |
| C027.003#46 | lgT3-PO-lgT3-PO-lgT3-PO-mU- | mA-PS-fA-PS-mA-PO-fG- |
| | PO-mU-PO-mA-PO-mU-PO-fU- | PO-mU-PO-mC-PO-mA- |
| | PO-mA-PO-fA-PO-fU-PO-fA- | PO-fC-PO-fC-PO-mA-PO- |
| | PO-mU-PO-mG-PO-mG-PO-mU- | mU-PO-mA-PO-mU-PO- |
| | PO-mG-PO-mA-PO-mC-PO-mU- | fU-PO-mA-PO-fA-PO-mU- |
| | PO-mU-PO-mU-PO-lT4-PO-lT4 | PO-mA-PO-mA-PS-lA-PS- |
| | (SEQ ID NO: 627) | lA (SEQ ID NO: 639) |
| C027.003#47 | lgT3-PO-lgT3-PO-lgT3-PO-mU- | mA-PS-fA-PS-mA-PO-fG- |
| | PO-mU-PO-mA-PO-mU-PO-fU- | PO-mU-PO-mC-PO-mA- |
| | PO-mA-PO-fA-PO-fU-PO-fA- | PO-mC-PO-fC-PO-mA- |
| | PO-mU-PO-mG-PO-mG-PO-mU- | PO-mU-PO-mA-PO-mU- |
| | PO-mG-PO-mA-PO-mC-PO-mU- | PO4U-PO-mA-PO-fA-PO- |
| | PO-mU-PO-mU-PO-lT4-PO-lT4 | mU-PO-mA-PO-mA-PS- |
| | (SEQ ID NO: 627) | lA-PS-lA (SEQ ID |
| | | NO: 640) |
| C027.003#48 | lgT3-PS-lgT3-PS-lgT3-PO-mU- | mA-PS-fA-PS-mA-PO-fG- |
| | PO-mU-PO-mA-PO-mU-PO-fU- | PO-mU-PO-mC-PO-mA- |
| | PO-mA-PO-fA-PO-fU-PO-fA- | PO-mC-PO-mC-PO-mA- |
| | PO-mU-PO-mG-PO-mG-PO-mU- | PO-mU-PO-mA-PO-mU- |
| | PO-mG-PO-mA-PO-mC-PO-mU- | PO4U-PO-mA-PO-fA-PO- |
| | PO-mU-PO-mU-PS-lT4-PS-lT4 | mU-PO-mA-PO-mA-PS- |
| | (SEQ ID NO: 628) | mA-PS-mA (SEQ ID |
| | NO: 632) | |
| C027.003#49 | lgT3-PS-lgT3-PS-lgT3-PO-mU- | mA-PS-fA-PS-mA-PO- |
| | PO-mU-PO-mA-PO-mU-PO-fU- | mG-PO-mU-PO-fC-PO- |
| | PO-mA-PO-fA-PO-fU-PO-fA- | mA-PO-mC-PO-mC-PO- |
| | PO-mU-PO-mG-PO-mG-PO-mU- | mA-PO-mU-PO-mA-PO- |
| | PO-mG-PO-mA-PO-mC-PO-mU- | mU-PO4U-PO-mA-PO-fA- |
| | PO-mU-PO-mU-PS-lT4-PS-lT4 | PO-mU-PO-mA-PO-mA- |
| | (SEQ ID NO: 628) | PS-mA-PS-mA (SEQ ID |
| | | NO: 633) |
| C027.003#50 | lgT3-PS-lgT3-PS-lgT3-PO-mU- | mA-PS-fA-PS-mA-PO-fG- |
| | PO-mU-PO-mA-PO-mU-PO-fU- | PO-mU-PO-mC-PO-mA- |
| | PO-mA-PO-fA-PO-fU-PO-fA- | PO-fC-PO-fC-PO-mA-PO- |
| | PO-mU-PO-mG-PO-mG-PO-mU- | mU-PO-mA-PO-mU-PO- |
| | PO-mG-PO-mA-PO-mC-PO-mU- | fU-PO-mA-PO-fA-PO-mU- |
| | PO-mU-PO-mU-PS-lT4-PS-lT4 | PO-mA-PO-mA-PS-mA- |
| | (SEQ ID NO: 628) | PS-mA (SEQ ID NO: 634) |
| C027.003#51 | lgT3-PS-lgT3-PS-lgT3-PO-mU- | mA-PS-fA-PS-mA-PO-fG- |
| | PO-mU-PO-mA-PO-mU-PO-fU- | PO-mU-PO-mC-PO-mA- |
| | PO-mA-PO-fA-PO-fU-PO-fA- | PO-mC-PO-fC-PO-mA- |
| | PO-mU-PO-mG-PO-mG-PO-mU- | PO-mU-PO-mA-PO-mU- |
| | PO-mG-PO-mA-PO-mC-PO-mU- | PO4U-PO-mA-PO-fA-PO- |
| | PO-mU-PO-mU-PS-lT4-PS-lT4 | mU-PO-mA-PO-mA-PS- |
| | (SEQ ID NO: 628) | mA-PS-mA (SEQ ID |
| | | NO: 635) |
| C027.003#52 | lgT3-PS-lgT3-PS-lgT3-PO-mU- | fA-PS-fA-PS-mA-PO-fG- |
| | PO-mU-PO-mA-PO-mU-PO-fU- | PO-mU-PO-fC-PO-mA- |
| | PO-mA-PO-fA-PO-fU-PO-fA- | PO-fC-PO-mC-PO-fA-PO- |
| | PO-mU-PO-mG-PO-mG-PO-mU- | mU-PO-mA-PO-mU-PO- |
| | PO-mG-PO-mA-PO-mC-PO-mU- | fU-PO-mA-PO-fA-PO-mU- |
| | PO-mU-PO-mU-PS-lT4-PS-lT4 | PO-fA-PO-mA-PS-dT-PS- |
| | (SEQ ID NO: 628) | dT (SEQ ID NO: 636) |
| C027.003#53 | lgT3-PS-lgT3-PS-lgT3-PO-mU- | mA-PS-fA-PS-mA-PO-fG- |
| | PO-mU-PO-mA-PO-mU-PO-fU- | PO-mU-PO-mC-PO-mA- |
| | PO-mA-PO-fA-PO-fU-PO-fA- | PO-mC-PO-mC-PO-mA- |
| | PO-mU-PO-mG-PO-mG-PO-mU- | PO-mU-PO-mA-PO-mU- |
| | PO-mG-PO-mA-PO-mC-PO-mU- | PO4U-PO-mA-PO-fA-PO- |
| | PO-mU-PO-mU-PS-lT4-PS-lT4 | mU-PO-mA-PO-mA-PS- |
| | (SEQ ID NO: 628) | lA-PS-lA (SEQ ID |
| | | NO: 637) |
| C027.003#54 | lgT3-PS-lgT3-PS-lgT3-PO-mU- | mA-PS-fA-PS-mA-PO- |
| | PO-mU-PO-mA-PO-mU-PO-fU- | mG-PO-mU-PO-fC-PO- |
| | PO-mA-PO-fA-PO-fU-PO-fA- | mA-PO-mC-PO-mC-PO- |
| | PO-mU-PO-mG-PO-mG-PO-mU- | mA-PO-mU-PO-mA-PO- |
| | PO-mG-PO-mA-PO-mC-PO-mU- | mU-PO4U-PO-mA-PO-fA- |
| | PO-mU-PO-mU-PS-lT4-PS-lT4 | PO-mU-PO-mA-PO-mA- |
| | (SEQ ID NO: 628) | PS-lA-PS-lA (SEQ ID |
| | | NO: 638) |
| C027.003#55 | lgT3-PS-lgT3-PS-lgT3-PO-mU- | mA-PS-fA-PS-mA-PO-fG- |
| | PO-mU-PO-mA-PO-mU-PO-fU- | PO-mU-PO-mC-PO-mA- |
| | PO-mA-PO-fA-PO-fU-PO-fA- | PO-fC-PO-fC-PO-mA-PO- |
| | PO-mU-PO-mG-PO-mG-PO-mU- | mU-PO-mA-PO-mU-PO- |
| | PO-mG-PO-mA-PO-mC-PO-mU- | fU-PO-mA-PO-fA-PO-mU- |
| | PO-mU-PO-mU-PS-lT4-PS-lT4 | PO-mA-PO-mA-PS-lA-PS- |
| | (SEQ ID NO: 628) | lA (SEQ ID NO: 639) |
| C027.003#56 | lgT3-PS-lgT3-PS-lgT3-PO-mU- | mA-PS-fA-PS-mA-PO-fG- |
| | PO-mU-PO-mA-PO-mU-PO-fU- | PO-mU-PO-mC-PO-mA- |
| | PO-mA-PO-fA-PO-fU-PO-fA- | PO-mC-PO-fC-PO-mA- |
| | PO-mU-PO-mG-PO-mG-PO-mU- | PO-mU-PO-mA-PO-mU- |
| | PO-mG-PO-mA-PO-mC-PO-mU- | PO4U-PO-mA-PO-fA-PO- |
| | PO-mU-PO-mU-PS-lT4-PS-lT4 | mU-PO-mA-PO-mA-PS- |
| | (SEQ ID NO: 628) | lA-PS-lA (SEQ ID |
| | | NO: 640) |
| C027.003#57 | lgT3-PO-lgT3-PO-lgT3-PO-lT- | mA-PS-fA-PS-mA-PO-fG- |
| | PO-lT-PO-mA-PO-mU-PO-fU- | PO-mU-PO-mC-PO-mA- |
| | PO-mA-PO-fA-PO-fU-PO-fA- | PO-mC-PO-mC-PO-mA- |
| | PO-mU-PO-mG-PO-mG-PO-mU- | PO-mU-PO-mA-PO-mU- |
| | PO-mG-PO-mA-PO-mC-PO-mU- | PO4U-PO-mA-PO-fA-PO- |
| | PO-mU-PO-mU-PO-lT4-PO-lT4 | mU-PO-mA-PO-mA-PS- |
| | (SEQ ID NO: 629) | mA-PS-mA (SEQ ID |
| | | NO: 632) |
| C027.003#58 | lgT3-PO-lgT3-PO-lgT3-PO-lT- | mA-PS-fA-PS-mA-PO- |
| | PO-lT-PO-mA-PO-mU-PO-fU- | mG-PO-mU-PO-fC-PO- |
| | PO-mA-PO-fA-PO-fU-PO-fA- | mA-PO-mC-PO-mC-PO- |
| | PO-mU-PO-mG-PO-mG-PO-mU- | mA-PO-mU-PO-mA-PO- |
| | PO-mG-PO-mA-PO-mC-PO-mU- | mU-PO4U-PO-mA-PO-fA- |
| | PO-mU-PO-mU-PO-lT4-PO-lT4 | PO-mU-PO-mA-PO-mA- |
| | (SEQ ID NO: 629) | PS-mA-PS-mA (SEQ ID |
| | | NO: 633) |
| C027.003#59 | lgT3-PO-lgT3-PO-lgT3-PO-lT- | mA-PS-fA-PS-mA-PO-fG- |
| | PO-lT-PO-mA-PO-mU-PO-fU- | PO-mU-PO-mC-PO-mA- |
| | PO-mA-PO-fA-PO-fU-PO-fA- | PO-fC-PO-fC-PO-mA-PO- |
| | PO-mU-PO-mG-PO-mG-PO-mU- | mU-PO-mA-PO-mU-PO- |
| | PO-mG-PO-mA-PO-mC-PO-mU- | fU-PO-mA-PO-fA-PO-mU- |
| | PO-mU-PO-mU-PO-lT4-PO-lT4 | PO-mA-PO-mA-PS-mA- |
| | (SEQ ID NO: 629) | PS-mA (SEQ ID NO: 634) |
| C027.003#60 | lgT3-PO-lgT3-PO-lgT3-PO-lT- | mA-PS-fA-PS-mA-PO-fG- |
| | PO-lT-PO-mA-PO-mU-PO-fU- | PO-mU-PO-mC-PO-mA- |
| | PO-mA-PO-fA-PO-fU-PO-fA- | PO-mC-PO-fC-PO-mA- |
| | PO-mU-PO-mG-PO-mG-PO-mU- | PO-mU-PO-mA-PO-mU- |
| | PO-mG-PO-mA-PO-mC-PO-mU- | PO4U-PO-mA-PO-fA-PO- |
| | PO-mU-PO-mU-PO-lT4-PO-lT4 | mU-PO-mA-PO-mA-PS- |
| | (SEQ ID NO: 629) | mA-PS-mA (SEQ ID |
| | | NO: 635) |
| C027.003#61 | lgT3-PO-lgT3-PO-lgT3-PO-lT- | fA-PS-fA-PS-mA-PO-fG- |
| | PO-lT-PO-mA-PO-mU-PO-fU- | PO-mU-PO-fC-PO-mA- |
| | PO-mA-PO-fA-PO-fU-PO-fA- | PO-fC-PO-mC-PO-fA-PO- |
| | PO-mU-PO-mG-PO-mG-PO-mU- | mU-PO-mA-PO-mU-PO- |
| | PO-mG-PO-mA-PO-mC-PO-mU- | fU-PO-mA-PO-fA-PO-mU- |
| | PO-mU-PO-mU-PO-lT4-PO-lT4 | PO-fA-PO-mA-PS-dT-PS- |
| | (SEQ ID NO: 629) | dT (SEQ ID NO: 636) |
| C027.003#62 | lgT3-PS-lgT3-PS-lgT3-PO-lT- | mA-PS-fA-PS-mA-PO-fG- |
| | PO-lT-PO-mA-PO-mU-PO-fU- | PO-mU-PO-mC-PO-mA- |
| | PO-mA-PO-fA-PO-fU-PO-fA- | PO-mC-PO-mC-PO-mA- |
| | PO-mU-PO-mG-PO-mG-PO-mU- | PO-mU-PO-mA-PO-mU- |
| | PO-mG-PO-mA-PO-mC-PO-mU- | PO4U-PO-mA-PO-fA-PO- |
| | PO-mU-PO-mU-PS-lT4-PS-lT4 | mU-PO-mA-PO-mA-PS- |
| | (SEQ ID NO: 630) | mA-PS-mA (SEQ ID |
| | | NO: 632) |
| C027.003#63 | lgT3-PS-lgT3-PS-lgT3-PO-lT- | mA-PS-fA-PS-mA-PO- |
| | PO-lT-PO-mA-PO-mU-PO-fU- | mG-PO-mU-PO-fC-PO- |
| | PO-mA-PO-fA-PO-fU-PO-fA- | mA-PO-mC-PO-mC-PO- |
| | PO-mU-PO-mG-PO-mG-PO-mU- | mA-PO-mU-PO-mA-PO- |
| | PO-mG-PO-mA-PO-mC-PO-mU- | mU-PO4U-PO-mA-PO-fA- |
| | PO-mU-PO-mU-PS-lT4-PS-lT4 | PO-mU-PO-mA-PO-mA- |
| | (SEQ ID NO: 630) | PS-mA-PS-mA (SEQ ID |
| | | NO: 633) |
| C027.003#64 | lgT3-PS-lgT3-PS-lgT3-PO-lT- | mA-PS-fA-PS-mA-PO-fG- |
| | PO-lT-PO-mA-PO-mU-PO-fU- | PO-mU-PO-mC-PO-mA- |
| | PO-mA-PO-fA-PO-fU-PO-fA- | PO-fC-PO-fC-PO-mA-PO- |
| | PO-mU-PO-mG-PO-mG-PO-mU- | mU-PO-mA-PO-mU-PO- |
| | PO-mG-PO-mA-PO-mC-PO-mU- | fU-PO-mA-PO-fA-PO-mU- |
| | PO-mU-PO-mU-PS-lT4-PS-lT4 | PO-mA-PO-mA-PS-mA- |
| | (SEQ ID NO: 630) | PS-mA (SEQ ID NO: 634) |
| C027.003#65 | lgT3-PS-lgT3-PS-lgT3-PO-lT- | mA-PS-fA-PS-mA-PO-fG- |
| | PO-lT-PO-mA-PO-mU-PO-fU- | PO-mU-PO-mC-PO-mA- |
| | PO-mA-PO-fA-PO-fU-PO-fA- | PO-mC-PO-fC-PO-mA- |
| | PO-mU-PO-mG-PO-mG-PO-mU- | PO-mU-PO-mA-PO-mU- |
| | PO-mG-PO-mA-PO-mC-PO-mU- | PO4U-PO-mA-PO-fA-PO- |
| | PO-mU-PO-mU-PS-lT4-PS-lT4 | mU-PO-mA-PO-mA-PS- |
| | (SEQ ID NO: 630) | mA-PS-mA (SEQ ID |
| | | NO: 635) |
| C027.003#66 | lgT3-PS-lgT3-PS-lgT3-PO-lT- | fA-PS-fA-PS-mA-PO-fG- |
| | PO-lT-PO-mA-PO-mU-PO-fU- | PO-mU-PO-fC-PO-mA- |
| | PO-mA-PO-fA-PO-fU-PO-fA- | PO-fC-PO-mC-PO-fA-PO- |
| | PO-mU-PO-mG-PO-mG-PO-mU- | mU-PO-mA-PO-mU-PO- |
| | PO-mG-PO-mA-PO-mC-PO-mU- | fU-PO-mA-PO-fA-PO-mU- |
| | PO-mU-PO-mU-PS-lT4-PS-lT4 | PO-fA-PO-mA-PS-dT-PS- |
| | (SEQ ID NO: 630) | dT (SEQ ID NO: 636) |

[0177] In some embodiments, a dsRNA of the present disclosure comprises:
[0178] a) a sense strand comprising a nucleotide sequence selected from the group consisting of SEQ ID NOs: 578, 585, 587, 620, 621, 622, and 627; and/or
[0179] b) an antisense strand comprising a nucleotide sequence selected from the group consisting of SEQ ID NOs: 589, 591, 631, 632, 634, 635 and 639.

[0180] In some embodiments, the sense strand and the antisense strand of the dsRNA respectively comprise the nucleotide sequences of:

[0181] a) SEQ ID NOs: 578 and 589; [C027.001]

[0182] b) SEQ ID NOs: 620 and 631; [C027.003]

[0183] c) SEQ ID NOs: 585 and 591; [C027.001#40]

[0184] d) SEQ ID NOs: 587 and 591; [C027.001#58]

[0185] e) SEQ ID NOs: 621 and 634; [C027.003#03]

[0186] f) SEQ ID NOs: 622 and 632; [C027.003#06]

[0187] g) SEQ ID NOs: 622 and 635; and [C027.003#08]

[0188] h) SEQ ID NOs: 627 and 639; [C027.003#47]

[0189] In some embodiments, a dsRNA of the present disclosure (e.g., a first dsRNA) is used in a method or composition (e.g., a pharmaceutical composition) with one or more additional dsRNAs (e.g., at least a second dsRNA). In some embodiments, the second dsRNA also targets PCSK9. In some embodiments, the second dsRNA targets a region of PCSK9 that is different from the region targeted by the first dsRNA. In some embodiments, the second dsRNA targets a sequence derived from the sequence of an mRNA formed during the expression of a target gene other than the PCSK9 gene. In some embodiments, the second dsRNA targets a gene that interacts with PCSK9 and/or a gene that is involved in lipid metabolism or cholesterol metabolism.

[0190] dsRNA Modifications

[0191] In some embodiments, a dsRNA of the present disclosure comprises one or more modifications. Modifications may include any modification known in the art, including, for example, end modifications, base modifications, sugar modifications/replacements, and backbone modifications. End modifications may include, e.g., 5′ end modifications (such as phosphorylation, conjugation, inverted linkages, and the like) and 3′ end modifications (such as conjugates, DNA nucleotides, inverted linkages, and the like). Base modifications may include, e.g., replacement with stabilizing bases, destabilizing bases, bases that base pair with an expanded repertoire of partners, removal of bases (abasic nucleotides), or conjugated bases. Sugar modifications/replacements may include, e.g., modifications at the 2′ or 4′ position, or replacement of the sugar. Backbone modifications may include, e.g., modification or replacement of the phosphodiester linkages.

[0192] dsRNAs of the present disclosure may include one or more of modified nucleotides known in the art, including, 2′-O-methyl modified nucleotides, 2′-fluoro modified nucleotides, 2′-deoxy modified nucleotides, 2′-O-methoxyethyl modified nucleotides, modified nucleotides comprising alternate internucleotide linkages such as thiophosphates and phosphorothioates (e.g., 5′-phosphorothioate), phosphotriester modified nucleotides, modified nucleotides terminally linked to a cholesterol derivative or lipophilic moiety, peptide nucleic acids (PNAs; see Nielsen et al. (1991) Science 254, 1497-1500), constrained ethyl (cEt) modified nucleotides, inverted deoxy modified nucleotides, inverted dideoxy modified nucleotides, locked nucleic acid modified nucleotides, abasic modified nucleotides, 2′-amino modified nucleotides, 2′-alkyl modified nucleotides, morpholino-modified nucleotides, phosphoramidate modified nucleotides, modified nucleotides comprising modifications at other sites of the sugar or base of an oligonucleotide, and non-natural base-containing modified nucleotides. In some embodiments, at least one of the one or more modified nucleotides is a 2′-O-methyl nucleotide, 5′-phosphorothioate nucleotide, or a terminal nucleotide linked to a cholesterol derivative or lipophilic moiety. The incorporation of 2′-O-methyl, 2′-O-ethyl, 2′-O-propyl, 2′-O-allyl, 2′-O-aminoalkyl, or 2′-deoxy-2′-fluoro group in nucleosides of an oligonucleotide may confer enhanced hybridization properties and/or enhanced nuclease stability to the oligonucleotide. Further, oligonucleotides containing phosphorothioate backbones may have enhanced nuclease stability.

[0193] In some embodiments, a dsRNA of the present disclosure comprises one or more 2′-O-methyl nucleotides and one or more 2′-fluoro nucleotides. In some embodiments, the dsRNA comprises two or more 2′-O-methyl nucleotides and two or more 2′-fluoro nucleotides. In some embodiments, the dsRNA comprises two or more 2′-O-methyl nucleotides (OMe) and two or more 2′-fluoro nucleotides (F) in an alternating pattern, e.g., the pattern OMe-F-OMe-F or the pattern F-OMe-F-OMe. In some embodiments, the dsRNA comprises up to 10 contiguous nucleotides that are each a 2′-O-methyl nucleotide. In some embodiments, the dsRNA comprises up to 10 contiguous nucleotides that are each a 2′-fluoro nucleotide.

[0194] In some embodiments, a dsRNA of the present disclosure comprises one or more phosphorothioate groups. In some embodiments, a dsRNA of the present disclosure comprises two or more, three or more, four or more, five or more, six or more, seven or more, eight or more, nine or more, or 10 or more phosphorothioate groups. In some embodiments, the dsRNA does not comprise a phosphorothioate group.

[0195] In some embodiments, the dsRNA comprises one or more phosphotriester groups. In some embodiments, the dsRNA comprises two or more, three or more, four or more, five or more, six or more, seven or more, eight or more, nine or more, or 10 or more phosphotriester groups. In some embodiments, the dsRNA does not comprise a phosphotriester group.

[0196] In some embodiments, the dsRNA comprises two or more, three or more, four or more, five or more, six or more, seven or more, eight or more, nine or more, or 10 or more different modified nucleotides described herein. In some embodiments, the dsRNA comprises up to two contiguous modified nucleotides, up to three contiguous modified nucleotides, up to four contiguous modified nucleotides, up to five contiguous modified nucleotides, up to six contiguous modified nucleotides, up to seven contiguous modified nucleotides, up to eight contiguous modified nucleotides, up to nine contiguous modified nucleotides, or up to 10 contiguous modified nucleotides. In some embodiments, the contiguous modified nucleotides are the same modified nucleotide. In some embodiments, the contiguous modified nucleotides are two or more, three or more, four or more, five or more, six or more, seven or more, eight or more, nine or more, or ten or more different modified nucleotides.

[0197] dsRNA Conjugates

[0198] dsRNAs of the present disclosure may be chemically/physically linked to one or more ligands, moieties, or conjugates. In some embodiments, the dsRNA is conjugated/attached to one or more ligands via a linker. Any linker known in the art may be used, including, for example, trivalent branched linkers. Conjugating a ligand to a dsRNA may alter its distribution, enhance its cellular absorption and/or targeting to a particular tissue and/or uptake by one or more specific cell types (e.g., liver cells), and/or enhance the lifetime of the dsRNA agent. In some embodiments, a hydrophobic ligand is conjugated to the dsRNA to facilitate direct permeation of the cellular membrane and/or uptake across the cells (e.g., liver cells).

[0199] In some embodiments, the dsRNA is attached to one or more N-acetylgalactosamine (GalNAc) derivatives via a linker. In some embodiments, the dsRNA is attached to three or more GalNAc derivatives via a linker. In some embodiments, the linker is a trivalent branched linker. In some embodiments, the dsRNA is attached to three or more GalNAc derivatives via a trivalent branched linker. In some embodiments, the one or more GalNAc derivatives is attached to the 3′-end of the sense strand, the 3′-end of the antisense strand, the 5′-end of the sense strand, and/or the 5′-end of the antisense strand of the dsRNA.

[0200] Exemplary and non-limiting conjugates and linkers are described, e.g., in Biessen et al., Bioconjugate Chem. 13(2):295-302 (2002); Cedillo et al., Molecules 22(8):E1356 (2017); Grijalvo et al., Genes 9(2):E74 (2018); Huang et al., Molecular Therapy: Nucleic Acids 6:116-132 (2017); Nair et al., J. Am. Chem. Soc. 136:16958-16961 (2014); Ostergaard et al., Bioconjugate Chem. 26:1451-1455 (2015); Springer et al., Nucleic Acid Therapeutics 28(3):109-118 (2018); and U.S. Pat. Nos. 8,106,022, 9,127,276, and 8,927,705. GalNAc conjugation can be readily performed by methods well known in the art (e.g., as described in the above documents).

[0201] In some embodiments, a dsRNA of the present disclosure is attached to the compound below.

[chemical structure]

[0202] In some embodiments, the ligand is one or more targeting groups (e.g., a cell or tissue targeting agent), e.g., one or more proteins, glycoproteins, peptides, or molecules having a specific affinity for a co-ligand. Such ligands may include without limitation a lectin, glycoprotein, lipid or protein, e.g., an antibody, which binds to a specified cell type such as a liver cell. A targeting group may be a thyrotropin, melanotropin, lectin, glycoprotein, surfactant protein A, mucin carbohydrate, multivalent lactose, multivalent galactose, N-acetyl-galactosamine, N-acetyl-gulucosamine multivalent mannose, multivalent fucose, glycosylated polyaminoacids, multivalent galactose, transferrin, bisphosphonate, polyglutamate, polyaspartate, a lipid, cholesterol, a steroid, bile acid, folate, vitamin B12, or biotin.

[0203] Ligands may include, for example, a naturally occurring substance, such as a protein, carbohydrate (e.g., N-acetyl-glucosamine or N-acetyl-galactosamine), lipopolysaccharide, lipid, recombinant or synthetic molecule such as a synthetic polymer, polyamine, an alpha helical peptide, lectins, vitamins, and cofactors. In some embodiments, the ligand is one or more dyes, crosslinkers, polycyclic aromatic hydrocarbons, peptide conjugates (e.g., antennapedia peptide, Tat peptide), polyethylene glycol (PEG), enzymes, haptens, transport/absorption facilitators, synthetic ribonucleases (e.g., imidazole, bisimidazole, histamine, or imidazole clusters), human serum albumin (HSA), or LDL.

[0204] In some embodiments, the dsRNA is conjugated to one or more cholesterol derivatives or lipophilic moieties. Any lipophilic compound known in the art may be conjugated to the dsRNA, including, without limitation, cholesterol or a cholesterol derivative; cholic acid; a vitamin (such as folate, vitamin A, vitamin E (tocopherol), biotin, pyridoxal); bile or fatty acid conjugates, including both saturated and non-saturated (such as lauroyl (C₁₂), myristoyl (C₁₄) and palmitoyl (C₁₆), stearoyl (Cis) and docosanyl (C₂₂), lithocholic acid and/or lithocholic acid oleylamine conjugate (lithocholic-oleyl, C₄₃)); polymeric backbones or scaffolds (such as PEG, triethylene glycol (TEG), hexaethylene glycol (HEG), poly(lactic-co-glycolic acid) (PLGA), poly(lactide-co-glycolide) (PLG), hydrodynamic polymers); steroids (such as dihydrotestosterone); terpene (such as triterpene); cationic lipids or peptides; and/or a lipid or lipid-based molecule. Such a lipid or lipid-based molecule may bind a serum protein, e.g., human serum albumin (HSA). A lipid-based ligand may be used to modulate (e.g., control) the binding of the conjugate to a target tissue. For example, a lipid or lipid-based ligand that binds to HSA more strongly will be less likely to be targeted to the kidney and therefore less likely to be cleared from the body. The target tissue may be the liver, including parenchymal cells of the liver.

[0205] I. Compositions

[0206] Certain aspects of the present disclosure relate to compositions (e.g., pharmaceutical compositions) comprising a dsRNA as described herein. In some embodiments, the composition (e.g., pharmaceutical composition) further comprises a pharmaceutically acceptable carrier. In some embodiments, the composition (e.g., pharmaceutical composition) is useful for treating a disease or disorder associated with the expression or activity of the PCSK9 gene. In some embodiments, the disease or disorder associated with the expression of the PCSK9 gene is lipidemia (e.g., hyperlipidemia) and/or other forms of lipid imbalances such as hypercholesterolemia, hypertriglyceridemia, and pathological conditions associated with these disorders such as heart and circulatory diseases. Compositions (e.g., pharmaceutical compositions) of the present disclosure are formulated based upon the mode of delivery, including, for example, compositions formulated for delivery to the liver via parenteral delivery.

[0207] The compositions (e.g., pharmaceutical composition) of the present disclosure may be administered in dosages sufficient to inhibit expression of the PCSK9 gene. In some embodiments, a suitable dose of a dsRNA is in the range of 0.01 mg/kg-200 mg/kg body weight of the recipient.

[0208] One of ordinary skill in the art will appreciate that certain factors may influence the dosage and timing required to effectively treat a subject, including, but not limited to, severity of the disease or disorder, previous treatments, the general health and/or age of the subject, and one or more other diseases being present. Moreover, treatment of a subject with a therapeutically effective amount of a pharmaceutical composition can include a single treatment or a series of treatments. Estimates of effective dosages and in vivo half-lives for dsRNAs as disclosed herein may be made using conventional methodologies or on the basis of in vivo testing using an appropriate animal model.

[0209] dsRNA molecules of the present disclosure can be formulated in a pharmaceutically acceptable carrier or diluent. Pharmaceutically acceptable carriers can be liquid or solid, and may be selected with the planned manner of administration in mind so as to provide for the desired bulk, consistency, and other pertinent transport and chemical properties. Any known pharmaceutically acceptable carrier or diluent may be used, including, for example, water, saline solution, binding agents (e.g., polyvinylpyrrolidone or hydroxypropyl methylcellulose), fillers (e.g., lactose and other sugars, gelatin, or calcium sulfate), lubricants (e.g., starch, polyethylene glycol, or sodium acetate), disintegrates (e.g., starch or sodium starch glycolate), calcium salts (e.g., calcium sulfate, calcium chloride, calcium phosphate, etc.) and wetting agents (e.g., sodium lauryl sulfate).

[0210] dsRNA molecules of the present disclosure can be formulated into compositions (e.g., pharmaceutical compositions) containing the dsRNA admixed, encapsulated, conjugated, or otherwise associated with other molecules, molecular structures, or mixtures of nucleic acids. For example, a composition comprising one or more dsRNAs as described herein can contain other therapeutic agents such as other lipid lowering agents (e.g., statins). In some embodiments, the composition (e.g., pharmaceutical composition) further comprises a delivery vehicle (as described herein).

[0211] II. Methods of Making dsRNAs

[0212] A dsRNA of the present disclosure may be synthesized by any method known in the art. For example, a dsRNA may be synthesized by use of an automated synthesizer, by in vitro transcription and purification (e.g., using commercially available in vitro RNA synthesis kits), by transcription and purification from cells (e.g., cells comprising an expression cassette/vector encoding the dsRNA), and the like.

[0213] Preparation of Modified dsRNAs

[0214] Ligand-conjugated dsRNAs and ligand-molecule bearing sequence-specific linked nucleosides of the present disclosure may be assembled by any method known in the art, including, for example, by assembly on a suitable DNA synthesizer utilizing standard nucleotide or nucleoside precursors, or nucleotide or nucleoside conjugate precursors that already bear the linking moiety, ligand-nucleotide, or nucleoside-conjugated precursors that already bear the ligand molecule, or non-nucleoside ligand-bearing building blocks.

[0215] Ligand-conjugated dsRNAs of the present disclosure may be synthesized by any method known in the art, including, for example, by the use of a dsRNA bearing a pendant reactive functionality such as that derived from the attachment of a linking molecule onto the dsRNA. In some embodiments, this reactive oligonucleotide may be reacted directly with commercially-available ligands, ligands that are synthesized bearing any of a variety of protecting groups, or ligands that have a linking moiety attached thereto. In some embodiments, the methods facilitate the synthesis of ligand-conjugated dsRNA by the use of nucleoside monomers that have been appropriately conjugated with ligands and that may further be attached to a solid support material. In some embodiments, a dsRNA bearing an aralkyl ligand attached to the 3′-end of the dsRNA is prepared by first covalently attaching a monomer building block to a controlled-pore-glass support via a long-chain aminoalkyl group; then, nucleotides are bonded via standard solid-phase synthesis techniques to the monomer building-block bound to the solid support. The monomer building-block may be a nucleoside or other organic compound that is compatible with solid-phase synthesis.

[0216] In some embodiments, functionalized nucleoside sequences of the present disclosure possessing an amino group at the 5′-terminus are prepared using DNA synthesizer, and then reacted with an active ester derivative of a selected ligand. Active ester derivatives are well known to one of ordinary skill in the art. The reaction of the amino group and the active ester produces an oligonucleotide in which the selected ligand is attached to the 5′-position through a linking group. The amino group at the 5′-terminus can be prepared utilizing a 5′-amino-modifier C6 reagent. In some embodiments, ligand molecules are conjugated to oligonucleotides at the 5′-position by the use of a ligand-nucleoside phosphoramidite wherein the ligand is linked to the 5′-hydroxy group directly or indirectly via a linker. Such ligand-nucleoside phosphoramidites are typically used at the end of an automated synthesis procedure to provide a ligand-conjugated oligonucleotide bearing the ligand at the 5′-terminus.

[0217] III. Vectors and dsRNA Delivery

[0218] A dsRNA of the present disclosure may be delivered directly or indirectly. In some embodiments, the dsRNA is delivered directly by administering a composition (e.g., pharmaceutical composition) comprising the dsRNA to a subject. In some embodiments, the dsRNA is delivered indirectly by administering one or more vectors described herein.

[0219] Delivery

[0220] A dsRNA of the present disclosure may be delivered by any method known in the art, including, for example, by adapting a method of delivering a nucleic acid molecule for use with a dsRNA (See e.g., Akhtar, S. et al. (1992) Trends Cell. Biol. 2(5): 139-144; WO 94/02595), or via additional methods known in the art (See e.g., Kanasty, R. et al. (2013) Nature Materials 12: 967-977; Wittrup, A. and Lieberman, J. (2015) Nature Reviews Genetics 16: 543-552; Whitehead, K. et al. (2009) Nature Reviews Drug Discovery 8: 129-138; Gary, D. et al. (2007) 121 (1-2): 64-73; Wang. J. et al. (2010) AAPS J. 12(4): 492-503; Draz, M. et al. (2014) Theranostics 4(9): 872-892; Wan, C. et al. (2013) Drug Deliv. And Transl. Res. 4(1): 74-83; Erdmann, V. A. and Barciszewski, J. (eds.) (2010) “RNA Technologies and Their Applications”, Springer-Verlag Berlin Heidelberg, DOI 10.1007/978-3-642-12168-5; Xu, C. and Wang, J. (2015) Asian Journal of Pharmaceutical Sciences 10(1): 1-12).

[0221] In some embodiments, a dsRNA of the present disclosure is delivered by a delivery vehicle comprising the dsRNA. In some embodiments, the delivery vehicle is a liposome, lipoplex, complex, or nanoparticle.

[0222] Liposomal Formulations

[0223] Liposomes are unilamellar or multilamellar vesicles which have a membrane formed from a lipophilic material and an aqueous interior. In some embodiments, a liposome is a vesicle composed of amphiphilic lipids arranged in a spherical bilayer or bilayers. The aqueous portion contains the composition to be delivered. Cationic liposomes possess the advantage of being able to fuse to the cell wall. Advantages of liposomes include, e.g., liposomes obtained from natural phospholipids are biocompatible and biodegradable; liposomes can incorporate a wide range of water and lipid soluble drugs; liposomes can protect encapsulated drugs in their internal compartments from metabolism and degradation (Rosoff, in Pharmaceutical Dosage Forms, Lieberman, Rieger and Banker (Eds.), 1988, Marcel Dekker, Inc., New York, N.Y., volume 1, p. 245). Important considerations in the preparation of liposome formulations are the lipid surface charge, vesicle size and the aqueous volume of the liposomes. For example, engineered cationic liposomes and sterically stabilized liposomes can be used to deliver the dsRNA. See, e.g., Podesta et al. (2009) Methods Enzymol. 464, 343-54; U.S. Pat. No. 5,665,710.

[0224] Nucleic Acid-Lipid Particles

[0225] In some embodiments, a dsRNA of the present disclosure is fully encapsulated in a lipid formulation, e.g., to form a nucleic acid-lipid particle, e.g., a SPLP, pSPLP, or SNALP. As used herein, the term “SNALP” refers to a stable nucleic acid-lipid particle, including SPLP. As used herein, the term “SPLP” refers to a nucleic acid-lipid particle comprising plasmid DNA encapsulated within a lipid vesicle. Nucleic acid-lipid particles, e.g., SNALPs, typically contain a cationic lipid, a non-cationic lipid, and a lipid that prevents aggregation of the particle (e.g., a PEG-lipid conjugate). SNALPs and SPLPs are useful for systemic applications, as they exhibit extended circulation lifetimes following intravenous (i.v.) injection and accumulate at distal sites (e.g., sites physically separated from the administration site). SPLPs include “pSPLP”, which include an encapsulated condensing agent-nucleic acid complex as set forth in PCT Publication No. WO 00/03683.

[0226] In some embodiments, dsRNAs when present in the nucleic acid-lipid particles are resistant in aqueous solution to degradation with a nuclease. Nucleic acid-lipid particles and their methods of preparation are disclosed in, e.g., U.S. Pat. Nos. 5,976,567; 6,534,484; 6,815,432; and PCT Publication No. WO 96/40964.

[0227] In some embodiments, the nucleic acid-lipid particles comprise a cationic lipid. Any cationic lipid or mixture thereof known in the art may be used. In some embodiments, the nucleic acid-lipid particles comprise a non-cationic lipid. Any non-cationic lipid or mixture thereof known in the art may be used. In some embodiments, the nucleic acid-lipid particle comprises a conjugated lipid (e.g., to prevent aggregation). Any conjugated lipid known in the art may be used.

[0228] Additional Formulations

[0229] Factors that are important to consider in order to successfully deliver a dsRNA molecule in vivo include: (1) biological stability of the delivered molecule, (2) preventing nonspecific effects, and (3) accumulation of the delivered molecule in the target tissue. The nonspecific effects of a dsRNA can be minimized by local administration, for example by direct injection or implantation into a tissue or topically administering the preparation. For administering a dsRNA systemically for the treatment of a disease, the dsRNA may be modified or alternatively delivered using a drug delivery system; both methods act to prevent the rapid degradation of the dsRNA by endo and exo-nucleases in vivo. Modification of the RNA or the pharmaceutical carrier may also permit targeting of the dsRNA composition to the target tissue and avoid undesirable off-target effects. As described above, dsRNA molecules may be modified by chemical conjugation to lipophilic groups such as cholesterol to enhance cellular uptake and prevent degradation. In some embodiments, the dsRNA is delivered using drug delivery systems such as a nanoparticle, a dendrimer, a polymer, liposomes, or a cationic delivery system. Positively charged cationic delivery systems facilitate binding of a dsRNA molecule (negatively charged) and also enhance interactions at the negatively charged cell membrane to permit efficient uptake of a dsRNA by the cell. Cationic lipids, dendrimers, or polymers can either be bound to a dsRNA, or induced to form a vesicle or micelle (See e.g., Kim S. H. et al. (2008) Journal of Controlled Release 129(2):107-116) that encases a dsRNA. The formation of vesicles or micelles further prevents degradation of the dsRNA when administered systemically. Methods for making and administering cationic-dsRNA complexes are known in the art. In some embodiments, a dsRNA forms a complex with cyclodextrin for systemic administration.

[0230] Vector Encoded dsRNAs

[0231] A dsRNA of the present disclosure may be encoded by a recombinant vector. In some embodiments, the vector is a DNA vector or an RNA vector. In some embodiments, the vector is a plasmid, cosmid, or viral vector. In some embodiments, the vector is compatible with expression in prokaryotic cells. In some embodiments, the vector is compatible with expression in E. coli. In some embodiments, the vector is compatible with expression in eukaryotic cells. In some embodiments, the vector is compatible with expression in yeast cells. In some embodiments, the vector is compatible with expression in vertebrate cells. Any expression vector capable of encoding the dsRNA known in the art may be used, including, for example, vectors derived from adenovirus (AV), adeno-associated virus (AAV), retroviruses (e.g., lentiviruses (LV), Rhabdoviruses, murine leukemia virus, etc.), herpes virus, SV40 virus, polyoma virus, papilloma virus, picornavirus, pox virus (e.g., orthopox or avipox), and the like. The tropism of viral vectors or viral-derived vectors may be modified by pseudotyping the vectors with envelope proteins or other surface antigens from one or more other viruses, or by substituting different viral capsid proteins, as appropriate. For example, lentiviral vectors may be pseudotypes with surface proteins from vesicular stomatitis virus (VSV), rabies, Ebola, Mokola, and the like. AAV vectors may be made to target different cells by engineering the vectors to express different capsid protein serotypes. For example, an AAV vector expressing a serotype 2 capsid on a serotype 2 genome is called AAV 2/2. This serotype 2 capsid gene in the AAV 2/2 vector can be replaced by a serotype 5 capsid gene to produce an AAV 2/5 vector. Techniques for constructing AAV vectors which express different capsid protein serotypes have been described previously, e.g., Rabinowitz et al. (2002) J. Virol. 76:791-801.

[0232] Selection of recombinant vectors, methods for inserting nucleic acid sequences into the vector for expressing a dsRNA, and methods of delivering vectors into one or more cells of interest are known in the art. See, e.g., Domburg (1995) Gene Therap. 2:301-310; Eglitis (1998) Biotechniques 6:608-614; Miller (1990) Hum. Gene Therap. 1:5-14; Anderson (1998) Nature 392:25-30; Xia et al. (2002) Nat. Biotech. 20:1006-1010; Robinson et al. (2003) Nat. Genet. 33:401-406; Samulski et al. (1987) J. Virol. 61:3096-3101; Fisher et al. (1996) J. Virol. 70:520-532; Samulski et al. (1989) J. Virol. 63-3822-3826; U.S. Pat. Nos. 5,252,479; 5,139,941; WO 94/13788; and WO 93/24641.

[0233] Vectors useful for the delivery of a dsRNA as described herein may include regulatory elements (e.g., heterologous promoter, enhancer, etc.) sufficient for expression of the dsRNA in the desired target cell or tissue. In some embodiments, the vector comprises one or more sequences encoding the dsRNA linked to one or more heterologous promoters. Any heterologous promoter known in the art capable of expressing a dsRNA may be used, including, for example, the U6 or H1 RNA pol III promoters, the T7 promoter, and the cytomegalovirus promoter. The one or more heterologous promoters may be an inducible promoter, a repressible promoter, a regulatable promoter, and/or a tissue-specific promoter. Selection of additional promoters is within the abilities of one of ordinary skill in the art. In some embodiments, the regulatory elements are selected to provide constitutive expression. In some embodiments, the regulatory elements are selected to provide regulated/inducible/repressible expression. In some embodiments, the regulatory elements are selected to provide tissue-specific expression. In some embodiments, the regulatory elements and sequence encoding the dsRNA form a transcription unit.

[0234] A dsRNA of the present disclosure may be expressed from transcription units inserted into DNA or RNA vectors (See, e.g., Couture, A, et al. (1996) TIG 12:5-10; WO 00/22113; WO 00/22114; and U.S. Pat. No. 6,054,299). Expression may be transient (on the order of hours to weeks) or sustained (weeks to months or longer), depending upon the specific construct used and the target tissue or cell type. These transgenes can be introduced as a linear construct, a circular plasmid, or a viral vector, which can be an integrating or non-integrating vector. The transgene can also be constructed to permit it to be inherited as an extrachromosomal plasmid (Gassmann, et al. (1995) PNAS 92:1292).

[0235] In some embodiments, the sense and antisense strands of a dsRNA are encoded on separate expression vectors. In some embodiments, the sense and antisense strands are expressed on two separate expression vectors that are co-introduced (e.g., by transfection or infection) into the same target cell. In some embodiments, the sense and antisense strands are encoded on the same expression vector. In some embodiments, the sense and antisense strands are transcribed from separate promoters which are located on the same expression vector. In some embodiments, the sense and antisense strands are transcribed from the same promoter on the same expression vector. In some embodiments, the sense and antisense strands are transcribed from the same promoter as an inverted repeat joined by a linker polynucleotide sequence such that the dsRNA has a stem and loop structure.

[0236] IV. Cells

[0237] Certain aspects of the present disclosure relate to one or more isolated cells comprising a dsRNA as described herein, or one or more cells comprising a vector encoding a dsRNA as described herein. In some embodiments, the one or more cells are prokaryotic cells. In some embodiments, the one or more cells are E. coli cells. In some embodiments, the one or more cells are eukaryotic cells. Any eukaryotic cell known in the art may comprise a dsRNA or vector described herein, including, for example, yeast cells, monkey kidney CV1 line transformed by SV40 (COS-7, ATCC CRL 1651); human embryonic kidney line (293 or 293 cells subcloned for growth in suspension culture, Graham et al., J. Gen Virol. 36:59 (1977)); baby hamster kidney cells (BHK, ATCC CCL 10); mouse sertoli cells (TM4, Mather, Biol. Reprod. 23:243-251 (1980)); monkey kidney cells (CV1 ATCC CCL 70); African green monkey kidney cells (VERO-76, ATCC CRL-1587); human cervical carcinoma cells (HELA, ATCC CCL 2); canine kidney cells (MDCK, ATCC CCL 34); buffalo rat liver cells (BRL 3A, ATCC CRL 1442); human lung cells (W138, ATCC CCL 75); human liver cells (Hep G2, HB 8065); Hep3B cells; C3A cells; mouse mammary tumor (MMT 060562, ATCC CCL51); CHO cells (such as DHFR-CHO cells, e.g., ATCC CRL-9096); TRI cells (Mather et al., Annals N.Y. Acad. Sci. 383:44-68 (1982)); MRC 5 cells; FS4 cells; myeloma cell lines (such as NS0 and Sp2/0); and primary cells from a subject (such as primary cells isolated from a human or a non-human primate).

[0238] V. Methods of Using dsRNA

[0239] Certain aspects of the present disclosure relate to methods for inhibiting the expression of the PCSK9 gene in a mammal comprising administering an effective amount of one or more dsRNAs of the present disclosure, one or more vectors of the present disclosure, or a composition (e.g., pharmaceutical composition) of the present disclosure comprising one or more dsRNAs of the present disclosure. Certain aspects of the present disclosure relate to methods of treating and/or preventing one or more PCSK9-mediated diseases or disorders comprising administering one or more dsRNAs of the present disclosure and/or one or more vectors of the present disclosure and/or a composition (e.g., pharmaceutical composition) comprising one or more dsRNAs of the present disclosure. In some embodiments, downregulating PCSK9 expression in a subject alleviates one or more symptoms of a PCSK9-mediated disease or disorder in the subject. Examples of dsRNAs are described in Section II.

[0240] In some embodiments, expression of the PCSK9 gene in the subject is inhibited by at least about 5%, at least about 10%, at least about 15%, at least about 20%, at least about 25%, at least about 30%, at least about 35%, at least about 40%, at least about 45%, at least about 50%, at least about 55%, at least about 60%, at least about 65%, at least about 70%, at least about 75%, at least about 80%, at least about 85%, at least about 90%, at least about 95%, at least about 99%, or about 100% after treatment as compared to pretreatment levels. In some embodiments, expression of the PCSK9 gene is inhibited by at least about 1.1 fold, at least about 1.5 fold, at least about 2 fold, at least about 2.5 fold, at least about 3 fold, at least about 3.5 fold, at least about 4 fold, at least about 4.5 fold, at least about 5 fold, at least about 5.5 fold, at least about 6 fold, at least about 6.5 fold, at least about 7 fold, at least about 7.5 fold, at least about 8 fold, at least about 8.5 fold, at least about 9 fold, at least about 9.5 fold, at least about 10 fold, at least about 25 fold, at least about 50 fold, at least about 75 fold, or at least about 100 fold after treatment as compared to pretreatment levels. In some embodiments, the PCSK9 gene is inhibited in the liver of the subject.

[0241] In some embodiments, the subject is human. In some embodiments, the subject has or has been diagnosed with a PCSK9-mediated disorder or disease. In some embodiments, the subject is suspected to have a PCSK9-mediated disorder or disease. In some embodiments, the subject is at risk for developing a PCSK9-mediated disorder or disease.

[0242] The dsRNAs and compositions (e.g., pharmaceutical compositions) described herein may be used to treat lipidemia (e.g., hyperlipidemia) and/or other forms of lipid imbalances such as hypercholesterolemia, hypertriglyceridemia, and pathological conditions associated with these disorders such as heart and circulatory diseases. In some embodiments, the method includes administering an effective amount of the dsRNA to a subject having a heterozygous LDLR genotype.

[0243] In some embodiments, the effect of inhibiting PCSK9 gene expression by any of the methods described herein results in a decrease in cholesterol levels in a subject. In some embodiments, the effect of inhibiting PCSK9 gene expression results in a decrease in cholesterol in the blood of a subject. In some embodiments, the effect of inhibiting PCSK9 gene expression results in a decrease in cholesterol in the serum of a subject. In some embodiments, cholesterol levels are decreased by at least about 5%, at least about 10%, at least about 15%, at least about 20%, at least about 25%, at least about 30%, at least about 35%, at least about 40%, at least about 45%, at least about 50%, at least about 55%, at least about 60% or more as compared to pretreatment levels. In some embodiments, cholesterol levels are decreased by at least about 1.1 fold, at least about 1.5 fold, at least about 2 fold, at least about 2.5 fold, at least about 3 fold, at least about 3.5 fold, at least about 4 fold, at least about 4.5 fold, at least about 5 fold, at least about 5.5 fold, at least about 6 fold, at least about 6.5 fold, at least about 7 fold, at least about 7.5 fold, at least about 8 fold, at least about 8.5 fold, at least about 9 fold, at least about 9.5 fold, at least about 10 fold, at least about 25 fold, at least about 50 fold, at least about 75 fold, at least about 100 fold or more as compared to pretreatment levels.

[0244] A dsRNA or composition (e.g., pharmaceutical composition) described herein may be administered by any means known in the art, including, without limitation, oral or parenteral routes, including intravenous, intramuscular, subcutaneous, pulmonary, transdermal, and airway (aerosol) administration. Typically, when treating a mammal with hyperlipidemia, the dsRNA molecules are administered systemically via parenteral means. In some embodiments, the dsRNAs and/or compositions are administered by subcutaneous administration. In some embodiments, the dsRNAs and/or compositions are administered by intravenous administration. In some embodiments, the dsRNAs and/or compositions are administered by pulmonary administration.

[0245] A treatment or preventative effect of a dsRNA is evident when there is a statistically significant improvement in one or more parameters of disease status, or by a failure to worsen or to develop symptoms where they would otherwise be anticipated. For example, a favorable change of at least 10%, 15%, 20%, 25%, 30%, 35%, 40%, 45%, 50% or more in a measurable parameter of disease may be indicative of effective treatment. Efficacy for a given dsRNA or composition comprising the dsRNA may also be judged using an experimental animal model for the given disease or disorder known in the art. When using an experimental animal model, efficacy of treatment is evidenced when a statistically significant reduction in a marker or symptom is observed.

[0246] Additional Agents

[0247] In some embodiments, a dsRNA of the present disclosure is administered in combination with one or more additional therapeutic agents. In some embodiments, the dsRNA and additional therapeutic agent are administered in combination in the same composition. In some embodiments, the dsRNA and additional therapeutic agent are administered as part of separate compositions. In some embodiments, the separate compositions are administered concurrently. In some embodiments, a composition comprising the dsRNA is first administered to the subject, and then the additional therapeutic agent is administered to the subject. In some embodiments, a composition comprising the additional therapeutic agent is first administered to the subject, and then the composition comprising the dsRNA is administered to the subject.

[0248] Examples of additional therapeutic agents include any known in the art to treat a lipid disorder, such as hypercholesterolemia, atherosclerosis or dyslipidemia. For example, the additional agent may be one or more of HMG-CoA reductase inhibitor (e.g., a statin), a fibrate, a bile acid sequestrant, niacin, an antiplatelet agent, an angiotensin converting enzyme inhibitor, an angiotensin II receptor antagonist (e.g., losartan potassium), an acylCoA cholesterol acetyltransferase (ACAT) inhibitor, a cholesterol absorption inhibitor, a cholesterol ester transfer protein (CETP) inhibitor, a microsomal triglyceride transfer protein (MTTP) inhibitor, a cholesterol modulator, a bile acid modulator, or a peroxisome proliferation activated receptor (PPAR) agonist. Particular examples include, without limitation, atorvastatin, pravastatin, simvastatin, lovastatin, fluvastatin, cerivastatin, rosuvastatin, ezetimibe, bezafibrate, clofibrate, fenofibrate, gemfibrozil, ciprofibrate, cholestyramine, colestipol, colesevelam, and niacin. Exemplary combination therapies suitable for administration with a dsRNA targeting PCSK9 include, e.g., niacin/lovastatin, amlodipine/atorvastatin, and ezetimibe/simvastatin.

[0249] In some embodiments, the present disclosure provides a method of instructing an end user (e.g., a caregiver or a subject) how to administer a dsRNA described herein. The method includes, optionally, providing the end user with one or more doses of the dsRNA, and instructing the end user to administer the dsRNA on a regimen described herein, thereby instructing the end user.

[0250] Identification of Patients

[0251] In some embodiments, the present disclosure provides methods of treating a subject by selecting a subject on the basis that the subject is in need of LDL lowering, LDL lowering without HDL lowering, ApoB lowering, or total cholesterol lowering. In some embodiments, the method comprises administering to the subject a dsRNA in an amount sufficient to lower the subject's LDL levels or ApoB levels (e.g., without substantially lowering HDL levels).

[0252] Genetic predisposition plays a role in the development of target gene associated diseases, e.g., hyperlipidemia. Therefore, a subject in need of a dsRNA may be identified by taking a family history, or, for example, screening for one or more genetic markers or variants. Examples of genes involved in hyperlipidemia may include, without limitation, LDL receptor (LDLR), the apoliproteins (ApoAl, ApoB, ApoE, and the like), cholesteryl ester transfer protein (CETP), lipoprotein lipase (LPL), hepatic lipase (LIPC), endothelial lipase (EL), lecithin:cholesteryl acyltransferase (LCAT).

[0253] A healthcare provider, such as a doctor, nurse, or family member, can take a family history before prescribing or administering a dsRNA. In addition, a test may be performed to determine a genotype or phenotype. For example, a DNA test may be performed on a sample from the subject, e.g., a blood sample, to identify the PCSK9 genotype and/or phenotype before a PCSK9 dsRNA is administered to the subject. In some embodiments, a test is performed to identify a related genotype and/or phenotype, e.g., a LDLR genotype. Examples of genetic variants with the LDLR gene are known in the art, (Costanza et al. (2005) Am. J. Epidemiol. 15; 161(8):714-24; Yamada et al. (2008) J. Med. Genet. January; 45(1):22-8; and Boes et al. (2009) Exp. Gerontol. 44:136-160).

[0254] VI. Kits and Articles of Manufacture

[0255] Certain aspects of the present disclosure relate to an article of manufacture or a kit comprising one or more of the dsRNAs, vector(s), or composition(s) (e.g., pharmaceutical composition(s)) as described herein useful for the treatment and/or prevention of a PCSK9-mediated disorder or disease as described above. The article of manufacture or kit may further comprise a container and a label or package insert on or associated with the container. Suitable containers include, for example, bottles, vials, syringes, IV solution bags, etc. The containers may be formed from a variety of materials such as glass or plastic. The container holds a composition which is by itself or combined with another composition effective for treating or preventing the disease and may have a sterile access port (for example the container may be an intravenous solution bag or a vial having a stopper pierceable by a hypodermic injection needle). At least one active agent in the composition is a dsRNA described herein. The label or package insert indicates that the composition is used for treating a PCSK9-mediated disorder or disease. In some embodiments, disease is a lipidemia (e.g., hyperlipidemia) and/or other forms of lipid imbalances such as hypercholesterolemia, hypertriglyceridemia, and pathological conditions associated with these disorders such as heart and circulatory diseases. Moreover, the article of manufacture or kit may comprise (a) a first container with a composition contained therein, wherein the composition comprises a dsRNA described herein; and (b) a second container with a composition contained therein, wherein the composition comprises a second therapeutic agent. The article of manufacture or kit in this embodiment of the present disclosure may further comprise a package insert indicating that the compositions can be used to treat a particular disease. Alternatively, or additionally, the article of manufacture or kit may further comprise a second (or third) container comprising a pharmaceutically-acceptable buffer, such as bacteriostatic water for injection (BWFI), phosphate-buffered saline, Ringer's solution and dextrose solution. It may further include other materials desirable from a commercial and user standpoint, including other buffers, diluents, filters, needles, and syringes.

[0256] Without limiting the present disclosure, a number of embodiments of the present disclosure are described below for the purpose of illustration.

[0257] Item 1: A double-stranded ribonucleic acid (dsRNA), wherein the dsRNA comprises a sense strand comprising a first sequence and an antisense strand comprising a second sequence, wherein the first sequence and the second sequence are complementary, and wherein the first sequence comprises a sequence selected from the group consisting of SEQ ID NOS: 6-11 and 310-321.

[0258] Item 2: The dsRNA of item 1, wherein the dsRNA comprises:

(1)
(SEQ ID NO: 176)
CCAUUUUAUUAAUAUGGUGACUinvdT
in the sense strand and
(SEQ ID NO: 177)
AGUCACCAUAUUAAUAAAAdTdT
in the antisense strand,
(2)
(SEQ ID NO: 180)
CCAUAUUAAUAUGGUGACUUUUinvdT
in the sense strand and
(SEQ ID NO: 181)
AAAAGUCACCAUAUUAAUAdTdT
in the antisense strand,
(3)
(SEQ ID NO: 182)
CCAAUUAAUAUGGUGACUUUUUinvdT
in the sense strand and
(SEQ ID NO: 183)
AAAAAGUCACCAUAUUAAUdTdT
in the antisense strand,
(4)
(SEQ ID NO: 184)
CCAUUAAUAUGGUGACUUUUUAinvdT
in the sense strand and
(SEQ ID NO: 185)
UAAAAAGUCACCAUAUUAAdTdT
in the antisense strand,
(5)
(SEQ ID NO: 186)
CCAUAAUAUGGUGACUUUUUAAinvdT
in the sense strand and
(SEQ ID NO: 187)
UUAAAAAGUCACCAUAUUAdTdT
in the antisense strand,
(6)
(SEQ ID NO: 188)
CCAUAUGGUGACUUUUUAAAAUinvdT
in the sense strand and
(SEQ ID NO: 189)
AUUUUAAAAAGUCACCAUAdTdT
in the antisense strand,
(7)
(SEQ ID NO: 322)
CCAUUAUUAAUAUGGUGACUUUinvdT
in the sense strand and
(SEQ ID NO: 323)
AAAGUCACCAUAUUAAUAAdTdT
in the antisense strand,
(8)
(SEQ ID NO: 324)
CCAAUAUGGUGACUUUUUAAAAinvdT
in the sense strand and
(SEQ ID NO: 325)
UUUUAAAAAGUCACCAUAUdtdt
in the antisense strand,
(9)
(SEQ ID NO: 326)
CCAAUUUUUAUUAAUAUGGUGACUinvdT
in the sense strand and
(SEQ ID NO: 327)
AGUCACCAUAUUAAUAAAAAUdTdT
in the antisense strand,
(10)
(SEQ ID NO: 328)
CCAUUUUAUUAAUAUGGUGACUUUinvdT
in the sense strand and
(SEQ ID NO: 329)
AAAGUCACCAUAUUAAUAAAAdTdT
in the antisense strand,
(11)
(SEQ ID NO: 330)
CCAUUUAUUAAUAUGGUGACUUUUinvdT
in the sense strand and
(SEQ ID NO: 331)
AAAAGUCACCAUAUUAAUAAAdTdT
in the antisense strand,
(12)
(SEQ ID NO: 332)
CCAUAUUAAUAUGGUGACUUUUUAinvdT
in the sense strand and
(SEQ ID NO: 333)
UAAAAAGUCACCAUAUUAAUAdTdT
in the antisense strand,
(13)
(SEQ ID NO: 334)
CCAAAUAUGGUGACUUUUUAAAAUinvdT
in the sense strand and
(SEQ ID NO: 335)
AUUUUAAAAAGUCACCAUAUUdTdT
in the antisense strand,
(14)
(SEQ ID NO: 336)
CCAGCAUUUUUAUUAAUAUGGUGACUinvdT
in the sense strand and
(SEQ ID NO: 337)
AGUCACCAUAUUAAUAAAAAUGCdTdT
in the antisense strand,
(15)
(SEQ ID NO: 338)
CCAAUUUUUAUUAAUAUGGUGACUUUinvdT
in the sense strand and
(SEQ ID NO: 339)
AAAGUCACCAUAUUAAUAAAAAUdTdT
in the antisense strand,
(16)
(SEQ ID NO: 340)
CCAUUUUUAUUAAUAUGGUGACUUUUinvdT
in the sense strand and
(SEQ ID NO: 341)
AAAAGUCACCAUAUUAAUAAAAAdTdT
in the antisense strand,
(17)
(SEQ ID NO: 342)
CCAUUUAUUAAUAUGGUGACUUUUUAinvdT
in the sense strand and
(SEQ ID NO: 343)
UAAAAAGUCACCAUAUUAAUAAAdTdT
in the antisense strand, or
(18)
(SEQ ID NO: 344)
CCAUUAUUAAUAUGGUGACUUUUUAAinvdT
in the sense strand and
(SEQ ID NO: 345)
UUAAAAAGUCACCAUAUUAAUAAdTdT
in the antisense strand.

[0259] Item 3: A double-stranded ribonucleic acid (dsRNA), wherein the dsRNA comprises a sense strand comprising a first sequence and an antisense strand comprising a second sequence, wherein only the first sequence and the second sequence are complementary, and wherein the first sequence is one of SEQ ID NOS: 3, 4, and 13.

[0260] Item 4: The dsRNA of item 3, wherein the dsRNA comprises:

(19)
(SEQ ID NO: 162)
CCAUUGUAGCAUUUUUAUUAAUinvdT
in the sense strand and
(SEQ ID NO: 163)
AUUAAUAAAAAUGCUACAAdTdT
in the antisense strand,
(20)
(SEQ ID NO: 166)
CCAGUAGCAUUUUUAUUAAUAUinvdT
in the sense strand and
(SEQ ID NO: 167)
AUAUUAAUAAAAAUGCUACdTdT
in the antisense strand, or
(21)
(SEQ ID NO: 290)
CCAGAGUGUGAAAGGUGCUGAUinvdT
in the sense strand and
(SEQ ID NO: 291)
AUCAGCACCUUUCACACUCdTdT
in the antisense strand.

[0261] Item 5: The dsRNA of any one of items 1-4, wherein the first and second sequences are each less than or equal to 30 nucleotides in length.

[0262] Item 6: The dsRNA of any one of items 1-5, wherein the first and second sequences are each at least 19 and less than or equal to 23 nucleotides in length.

[0263] Item 7: The dsRNA of any one of items 1-6, wherein the dsRNA is a small interfering RNA (siRNA) or short hairpin RNA (shRNA).

[0264] Item 8: The dsRNA of any one of items 1-7, wherein the dsRNA comprises one or more modified nucleotides.

[0265] Item 9: the dsRNA of item 8, wherein at least one of the one or more modified nucleotides is a 2′-O-methyl nucleotide, 5′-phosphorothioate nucleotide, or a terminal nucleotide linked to a cholesterol derivative or lipophilic moiety.

[0266] Item 10: The dsRNA of item 8, wherein at least one of the one or more modified nucleotides is a 2′-fluoro, 2′-deoxy, 2′-O-methoxyethyl, constrained ethyl (cEt), inverted deoxy, inverted dideoxy, locked nucleic acid, abasic, 2′-amino, 2′-alkyl, morpholino, phosphoramidate, or a non-natural base-containing nucleotide.

[0267] Item 11: The dsRNA of item 10, wherein the dsRNA comprises one or more 2′-O-methyl nucleotides and one or more 2′-fluoro nucleotides.

[0268] Item 12: The dsRNA of item 11, wherein the dsRNA comprises two or more 2′-O-methyl nucleotides and two or more 2′-fluoro nucleotides in the pattern OMe-F-OMe-F or F-OMe-F-OMe, wherein OMe represents a 2′-O-methyl nucleotide, and wherein F represents a 2′-fluoro nucleotide.

[0269] Item 13: The dsRNA of item 11, wherein the dsRNA comprises up to 10 contiguous nucleotides that are each a 2′-O-methyl nucleotide or up to 10 contiguous nucleotides that are each a 2′-fluoro nucleotide.

[0270] Item 14: The dsRNA of any one of items 1-13, wherein the dsRNA comprises one or more phosphorothioate groups.

[0271] Item 15: The dsRNA of any one of items 1-13, wherein the dsRNA does not comprise a phosphorothioate group.

[0272] Item 16: The dsRNA of any one of items 1-15, wherein the dsRNA comprises one or more phosphotriester groups.

[0273] Item 17: The dsRNA of any one of items 1-15, wherein the dsRNA does not comprise a phosphotriester group.

[0274] Item 18: The dsRNA of any one of items 1-17, wherein the dsRNA is attached to one or more GalNAc derivatives via a linker.

[0275] Item 19: The dsRNA of item 18, wherein the dsRNA is attached to three GalNAc derivatives via a trivalent branched linker.

[0276] Item 20: The dsRNA of item 18 or item 19, wherein at least one of the one or more GalNAc derivatives is attached to the 3′ end of the sense strand, the 3′ end of the antisense strand, or the 5′ end of the sense strand of the dsRNA.

[0277] Item 21: The dsRNA of any one of items 1, 3, and 5-20, wherein one or both of the sense strand and the antisense strand further comprises a 5′ overhang comprising one or more nucleotides.

[0278] Item 22: The dsRNA of any one of items 1, 3, and 5-21, wherein one or both of the sense strand and the antisense strand further comprises a 3′ overhang comprising one or more nucleotides.

[0279] Item 23: The dsRNA of item 22, wherein the 3′ overhang comprises two nucleotides.

[0280] Item 24: The dsRNA of any one of items 21-23, wherein the overhang comprises one or more thymines.

[0281] Item 25: The dsRNA of any one of items 1-24, wherein the dsRNA inhibits expression of a Proprotein Convertase Subtilisin Kexin 9 (PCSK9) gene.

[0282] Item 26: The dsRNA of item 1, wherein one or both of strands of the dsRNA comprise one or more compounds having the structure of formula (I):

[chemical structure]

wherein:
[0283] B is a heterocyclic nucleobase;
[0284] one of L1 and L2 is an internucleoside linking group linking the compound of formula (I) to a polynucleotide and the other of L1 and L2 is H, a protecting group, a phosphorus moiety or an internucleoside linking group linking the compound of formula (I) to a polynucleotide,
[0285] Y is O, NH, NR1 or N—C(═O)—R1, wherein R1 is:
   [0286] a (C1-C20) alkyl group, optionally substituted by one or more groups selected from an halogen atom, a (C1-C6) alkyl group, a (C3-C8) cycloalkyl group, a (C3-C14) heterocycle, a (C6-C14) aryl group, a (C5-C14) heteroaryl group, —O—Z1, —N(Z1)(Z2), —S—Z1, —CN, —C(=J)-O—Z1, —O—C(=J)-Z1, —C(=J)-N(Z1)(Z2), and —N(Z1)-C(=J)-Z2, wherein
   [0287] J is O or S,
   [0288] each of Z1 and Z2 is, independently, H, a (C1-C6) alkyl group, optionally substituted by one or more groups selected from a halogen atom and a (C1-C6) alkyl group,
      a (C3-C8) cycloalkyl group, optionally substituted by one or more groups selected from a halogen atom and a (C1-C6) alkyl group,
      a group —[C(═O)]m-R2-(O—CH2-CH2)p-R3, wherein
      m is an integer meaning 0 or 1,
      p is an integer ranging from 0 to 10,
[0289] R2 is a (C1-C20) alkylene group optionally substituted by a (C1-C6) alkyl group, —O—Z3, —N(Z3)(Z4), —S—Z3, —CN, —C(═K)—O—Z3, —O—C(═K)—Z3, —C(═K)—N(Z3)(Z4), or —N(Z3)-C(═K)—Z4, wherein
   [0290] K is O or S,
   [0291] each of Z3 and Z4 is, independently, H, a (C1-C6) alkyl group, optionally substituted by one or more groups selected from a halogen atom and a (C1-C6) alkyl group, and
   [0292] R3 is selected from the group consisting of a hydrogen atom, a (C1-C6) alkyl group, a (C1-C6) alkoxy group, a (C3-C8) cycloalkyl group, a (C3-C14) heterocycle, a (C6-C14) aryl group or a (C5-C14) heteroaryl group, or R3 is a cell targeting moiety,
[0293] X1 and X2 are each, independently, a hydrogen atom, a (C1-C6) alkyl group, and
[0294] each of Ra, Rb, Rc and Rd is, independently, H or a (C1-C6) alkyl group,
   or is a pharmaceutically acceptable salt thereof.

[0295] Item 27: The dsRNA of item 26, comprising one or more compounds of formula (I) wherein Y is:
[0296] a) NR1, R1 is a non-substituted (C1-C20) alkyl group;
[0297] b) NR1, R1 is a non-substituted (C1-C16) alkyl group, which includes an alkyl group selected from a group comprising methyl, isopropyl, butyl, octyl, and hexadecyl;
[0298] c) NR1, R1 is a (C3-C8) cycloalkyl group, optionally substituted by one or more groups selected from a halogen atom and a (C1-C6) alkyl group;
[0299] d) NR1, R1 is a cyclohexyl group;
[0300] e) NR1, R1 is a (C1-C20) alkyl group substituted by a (C6-C14) aryl group;
[0301] f) NR1, R1 is a methyl group substituted by a phenyl group; g) N—C(═O)—R1, R1 is an optionally substituted (C1-C20) alkyl group; or h) N—C(═O)—R1, R1 is methyl or pentadecyl.

[0302] Item 28: The dsRNA of items 26 or 27, comprising one or more compounds of formula (I) wherein B is selected from a group consisting of a pyrimidine, a substituted pyrimidine, a purine and a substituted purine, or a pharmaceutically acceptable salt thereof.

[0303] Item 29: The dsRNA of any one of items 26 to 28, wherein R3 is of formula (II)

[chemical structure]

wherein A1, A2 and A3 are OH,
A4 is OH or NHC(═O)—R5, wherein R5 is a (C1-C6) alkyl group, optionally substituted by an halogen atom, or a pharmaceutically acceptable salt thereof

[0304] Item 30: The dsRNA of any one of items 26 to 29, wherein R3 is N-acetyl-galactosamine, or a pharmaceutically acceptable salt thereof.

[0305] Item 31: The dsRNA of any one of items 26 to 30, comprising one or more nucleotides from Table A.

[0306] Item 32: The dsRNA of any one of items 26 to 31, comprising from 2 to 10 compounds of formula (I), or a pharmaceutically acceptable salt thereof.

[0307] Item 33: The dsRNA of item 32, wherein the 2 to 10 compounds of formula (I) are on the sense strand.

[0308] Item 34: The dsRNA of any one of items 26 to 33, wherein the sense strand comprises two to five compounds of formula (I) at the 5′ end, and/or comprises one to three compounds of formula (I) at the 3′ end.

[0309] Item 35: The dsRNA of any one of items 26 to 34, wherein

a) the two to five compounds of formula (I) at the 5′ end of the sense strand comprise lgT3, optionally comprising three consecutive lgT3 nucleotides; and/or
b) the one to three compounds of formula (I) at the 3′ end of the sense strand comprise lT4; optionally comprising two consecutive lT4.

[0310] Item 36: The dsRNA of any one of items 26 to 35, comprising one or more internucleoside linking groups independently selected from the group consisting of phosphodiester, phosphotriester, phosphorothioate, phosphorodithioate, alkyl-phosphonate and phosphoramidate backbone linking groups, or a pharmaceutically acceptable salt thereof.

[0311] Item 37: The dsRNA of any one of items 26 to 36, selected from the dsRNAs in Tables 2-4.

[0312] Item 38: The dsRNA of any one of items 26 to 37, wherein:

a) the sense strand comprises a nucleotide sequence selected from the group consisting of SEQ ID NOs: 578, 585, 587, 620, 621, 622, and 627; and/or
b) the antisense strand comprises a nucleotide sequence selected from the group consisting of SEQ ID NOs: 589, 591, 631, 632, 634, 635 and 639.

[0313] Item 39: The dsRNA of item 38, wherein the sense strand and antisense strand of the dsRNA respectively comprise the nucleotide sequences of:

[0314] a) SEQ ID NOs: 578 and 589; [C027.001]

[0315] b) SEQ ID NOs: 620 and 631; [C027.003]

[0316] c) SEQ ID NOs: 585 and 591; [C027.001#40]

[0317] d) SEQ ID NOs: 587 and 591; [C027.001#58]

[0318] e) SEQ ID NOs: 621 and 634; [C027.003#03]

[0319] f) SEQ ID NOs: 622 and 632; [C027.003#06]

[0320] g) SEQ ID NOs: 622 and 635; and [C027.003#08]

[0321] h) SEQ ID NOs: 627 and 639. [C027.003#47]

[0322] Item 40: A vector encoding the dsRNA of any one of items 1-39.

[0323] Item 41: An isolated host cell comprising the dsRNA of any one of items 1-39 or the vector of item 40.

[0324] Item 42: A kit comprising the dsRNA of any one of items 1-39.

[0325] Item 43: A composition comprising the dsRNA of any one of items 1-39.

[0326] Item 44: The composition of item 43, further comprising a pharmaceutically acceptable carrier.

[0327] Item 45: The composition of item 43 or item 44, further comprising a delivery vehicle.

[0328] Item 46: The composition of item 31, wherein the delivery vehicle is selected from the group consisting of a liposome, lipoplex, complex, and nanoparticle.

[0329] Item 47: A method of inhibiting expression of a PCSK9 gene in a subject, comprising administering to the subject an effective amount of the dsRNA of any one of items 1-39 or the composition of item 44.

[0330] Item 48: A method of treating or preventing a PCSK9-mediated disease in a subject in need thereof, comprising administering to the subject an effective amount of a dsRNA of any one of items 1-39 or the composition of item 44.

[0331] Item 49: The method of item 48, wherein the PCSK9-mediated disorder is hypercholesterolemia.

[0332] Item 50: The method of any one of items 48-49, wherein the expression of the PCSK9 gene in the liver of the subject is inhibited by the dsRNA.

[0333] Item 51: The method of any one of items 48-50, wherein the administration is subcutaneous, intravenous, or pulmonary administration.

[0334] Item 52: The method of any one of items 48-51, wherein the subject is a human.

[0335] Item 53: The method of any one of items 48-52, wherein the administration results in a decrease in serum cholesterol in the subject.

[0336] Item 54: The method of any one of items 48-53, further comprising administering to the subject an effective amount of one or more additional therapeutic agents for treating or preventing a PCSK9-mediated disease.

[0337] Although the foregoing disclosure has been described in some detail by way of illustration and example for purposes of clarity of understanding, the descriptions and examples should not be construed as limiting the scope of the present disclosure.

### EXAMPLES

[0338] The present disclosure will be more fully understood by reference to the following examples. They should not, however, be construed as limiting the scope of the present disclosure. It is understood that the examples and embodiments described herein are for illustrative purposes only and that various modifications or changes in light thereof will be suggested to persons skilled in the art and are to be included within the spirit and purview of this application and scope of the appended claims.

### Example 1: Identification of siRNAs for Inhibition of Human PCSK9 Expression

[0339] Methods

[0340] siRNA Production

[0341] siRNAs, including negative control siRNAs (“LV2 neg. Control” and “LV2 neg. Control 2”), were produced using solid phase oligonucleotide synthesis. Positive control siRNA s48694 was purchased from Ambion. The sequence of each siRNA, including nucleotide modifications, is shown in Table 2 supra.

[0342] Cells and Tissue Culture

[0343] Human Hep3B and human C3A cells were cultured as follows. Human Hep3B cells were grown at 37° C., 5% CO₂ and 95% RH, and cultivated in EMEM medium (ATCC, cat. no. 30-2003) supplemented with 10% FBS. Human C3A cells were grown at 37° C., 5% CO₂ and 95% RH, and cultivated in MEM medium (ThermoFisher, cat. no. 41090) supplemented with 10% FBS.

[0344] Transfections

[0345] For knock-down experiments, 20,000 cells/well of either Hep3B or C3A cells were used in a 96-well plate. The cells were transfected with the indicated concentration of siRNAs using 0.2 μl/well of Lipofectamine® RNAiMAX transfection reagent (ThermoFisher) according to the manufacturer's protocol in a reverse transfection setup and incubated for 48 h without medium change. Usually, N=4 technical replicates were carried out per test sample. For testing siRNA-related toxicities, 15,000 Hep3B or C3A cells were transfected as described above and incubated for 72 h.

[0346] mRNA Expression Analysis

[0347] 48 hours after siRNA transfection, the cellular RNA was harvested by usage of Promega's SV96 total RNA isolation system (cat. no. Z3500) according to the manufacturer's protocol including a DNase step during the procedure.

[0348] For cDNA synthesis the Reverse Transcriptase kit (cat. no. N8080234) was used from ThermoFisher. cDNA synthesis from 30 ng RNA was performed using 1.2 μl 10×RT buffer, 2.64 μl MgCl₂ (25 mM), 2.4 μl dNTPs (10 mM), 0.6 μl random hexamers (50 μM), 0.6 μl Oligo(dT)16 (50 μM), 0.24 μl RNase inhibitor (20 U/μl) and 0.3 μl Multiscribe (50 U/μl) in a total volume of 12 μl. Samples were incubated at 25° C. for 10 minutes and 42° C. for 60 minutes. The reaction was stopped by heating to 95° C. for 5 minutes.

[0349] PCSK9 mRNA levels were quantified by qPCR using the TaqMan Universal PCR Master Mix (cat. no. 4305719) and the TaqMan® Gene Expression assay Hs00545399_m1 from ThermoFisher. PCR was performed in technical duplicates with the ABI Prism 7900 under the following PCR conditions: 2 minutes at 50° C., 10 minutes at 95° C., 40 cycles with 95° C. for 15 seconds and 1 minute at 60° C. PCR was set up as a simplex PCR detecting the target gene (PCSK9) in one reaction and the housekeeping gene (RPL37A) for normalization in a second reaction. The final volume for the PCR reaction was 12.5 μl in a 1×PCR master mix, RPL37A primers were used in a final concentration of 50 nM and the probe of 200 nM. The ΔΔCt method was applied to calculate relative expression levels of the target transcripts. Percentage of PCSK9 expression was calculated by normalization based on the levels of the LV2 non-silencing siRNA control sequence.

[0350] IC₅₀ Measurements

[0351] Hep3B or C3A cells were transfected with the indicated siRNAs at concentrations ranging from 10 nM-0.01 pM using 10-fold dilution steps. The half maximal inhibitory concentration (IC₅₀) for each siRNA was calculated by applying a Biostat-Speed statistical calculation tool. Results were obtained using the 4-parameter logistic model according to Ratkovsky and Reedy (1986). The adjustment was obtained by non-linear regression using the Levenberg-Marquardt algorithm in SAS v9.1.3 software.

[0352] ELISA Assays

[0353] PCSK9 protein concentration was quantified in the supernatant of a culture of 25,000 C3A cells 48 hours after transfection with the indicated concentrations of siRNAs by R&D Systems' human PCSK9 Quantikine ELISA kit (cat. no. DPC900). The ELISA assays were performed using 50 μl of undiluted cell culture supernatant according to the manufacturer's protocol. Percentage of PCSK9 expression was calculated by normalization based on the mean levels of non-silencing siRNA control sequences.

[0354] Cytotoxicity

[0355] Cytotoxicity of each siRNA was measured 72 hours after transfection of a culture of 15,000 Hep3B or C3A cells by determining the ratio of cellular viability/toxicity in each sample. Cell viability was measured by determination of the intracellular ATP content using the CellTiter-Glo® assay (Promega, cat. no. G7570) according to the manufacturer's protocol. Cell toxicity was measured in the supernatant using the ToxiLight™ assay (Lonza, cat. no. LT07-217) according to the manufacturer's protocol.

[0356] Results

[0357] In order to identify siRNAs useful in targeting human PCSK9, the following criteria were applied. First, 19mers from the human PCSK9 mRNA sequence as set forth in NM_174936.3 (SEQ ID NO:1) were identified in silico with an overlap of 18 nucleotides. After a first round of filtering, 715 potential siRNAs of interest were identified. Next, all 19mers that overlapped with known SNPs (identified with a prevalence of greater than 10% in a Caucasian population) were excluded, leaving a pool of 692 19mer sequences. All 692 19mers were then aligned to the PCSK9 mRNA sequence of Macaca fascicularis, and all sequences having more than 1 mismatch to Macaca fascicularis PCSK9 were excluded, leaving 130 siRNA sequences with 0 mismatches, and an additional 267 siRNA sequences with 1 mismatch.

[0358] An in silico analysis was then carried out to identify any potential off-target transcripts in the human transcriptome (RefSeq RNA version 2015-10-20). Human off-target sequences with RNAseq expression (Illumina Body Atlas) FPKM<0.5 in liver tissue were not considered. All siRNA sequences of interest had either greater than two mismatches to any human transcript other than PCSK9, or had two mismatches with four or fewer human genes; sequences that did not meet one of these two criteria were filtered out. After filtration, 229 potential siRNAs were left. A final filtering step was carried out to identify siRNA sequences with less than 30% GC content, and 14 siRNAs were identified for functional characterization. All 14 of these siRNAs recognized target sequences in the 3′ untranslated region (UTR) of human PCSK9.

[0359] As described above, the 14 siRNAs were produced with nucleotides having 2′O-methyl and 2′-fluoro groups, but without additional modifications such as GalNAc ligands or phosphorothioates. To test the ability of these 14 siRNAs to reduce expression of PCSK9, human Hep3B cells were transfected with 0.1 nM or 1.0 nM of each siRNA and incubated for 48 hours. After incubation, mRNA expression of PCSK9 was measured in each sample and compared to positive and negative controls (FIG. 1). Nine of the 14 siRNAs showed the most potent hPCSK9 inhibition, reducing PCSK9 mRNA expression by at least 80% at a concentration of 1.0 nM, and by at least 50% at a concentration of 0.1 nM.

[0360] The activity of the 14 siRNAs of interest was further tested in human C3A cells, which are characterized by a higher level of PCSK9 expression than Hep3B cells (FIG. 2). siRNAs were tested at the following concentrations: 0.5 nM, 0.05 nM, and 0.005 nM. Five of the 14 siRNAs showed the most potent inhibition of hPCSK9 expression in this more stringent assay (B001, B003, B006, B013, and B014). These siRNAs reduced PCSK9 mRNA expression by at least 80% at a concentration of 0.5 nM, and by at least 50% at a concentration of 0.05 nM.

[0361] Next, cellular cytotoxicity was measured in Hep3B and C3A cells 72 hours after transfection with the 14 siRNAs of interest. Surprisingly, no obvious cytotoxicity in Hep3B or C3A cells was indicated for any of the siRNAs tested, even when used at a concentration of up to 50 nM (FIGS. 3A and 3B).

[0362] Taken together, these results demonstrate the identification of siRNAs capable of potent inhibition of PCSK9 expression in multiple human cell lines without significant cytotoxicity.

### Example 2: Characterization of Additional siRNAs for Inhibition of Human PCSK9 Expression

[0363] Additional siRNA sequences were selected as described above, except that the sequences were filtered for those having 30-65% G+C content. 60 siRNAs were produced as described in Example 1. These siRNAs recognize targets distributed throughout the 5′ UTR, 3′ UTR, and open reading frame (ORF) of human PCSK9.

[0364] To test the ability of these 60 siRNAs to reduce expression of PCSK9, human Hep3B cells were transfected with 0.1 nM or 1.0 nM of each siRNA and incubated for 48 hours. After incubation, mRNA expression of PCSK9 was measured in each sample and compared to positive and negative controls (FIG. 4). Five of the 60 siRNAs showed potent inhibition of hPCSK9 expression, reducing PCSK9 mRNA expression by at least 86% at a concentration of 1.0 nM.

[0365] The activity of the five most potent out of 60 siRNAs was further tested in human C3A cells (FIG. 5). siRNAs were tested at the following concentrations: 0.5 nM, 0.05 nM, and 0.005 nM. Three of the siRNAs tested showed potent inhibition of hPCSK9 expression, reducing PCSK9 mRNA expression by at least 75% at a concentration of 0.5 nM.

[0366] Next, cellular cytotoxicity was measured in Hep3B and C3A cells 72 hours after siRNA transfection (FIGS. 6A and 6B). One siRNA, C060, caused significant cytotoxicity in both cell lines, and another, C052, caused significant cytotoxicity in C3A cells. Based on the results of the activity and cytotoxicity data in C3A and Hep3B cells described above, 10 siRNAs were selected for IC₅₀ measurements (B001, B003, B006, B008, B010, B013, B014, and C051). The ten siRNAs were all of similar potency. The ten siRNAs were further found to reduce hPCSK9 protein in C3A cells as measured by ELISA assay, particularly at higher concentrations tested (FIG. 7).

[0367] The results of these experiments are summarized in Table A. The portion of each siRNA that contains its hPCSK9 target sequence is shown in Table B.

TABLE A
Functional activities of siRNAs.

| | | | | | C3A ELISA | | | |
|---|---|---|---|---|---|---|---|---|
| | C3A cells | | Hep3B cells | | (% Knock-down) | | | Cytotox- |
| | IC₅₀ | | IC₅₀ | | | C₅₀ | | icity |
| siRNA | (pM) | Iₘₐₓ % | (pM) | Iₘₐₓ % | siRNA | (pM) | ₘₐₓ % | IC₅₀ (pM) |
| B001 | 177 | 93.0 | 564 | 91.2 | B001 | 177 | 93.0 | 564 |
| B003 | 136 | 88.5 | 101 | 96.1 | B003 | 136 | 88.5 | 101 |
| B006 | 105 | 85.8 | 119 | 95.4 | B006 | 105 | 85.8 | 119 |
| B008 | 93 | 78.0 | 51 | 90.3 | B008 | 93 | 78.0 | 51 |
| B010 | 106 | 86.4 | 55 | 92.8 | B010 | 106 | 86.4 | 55 |
| B011 | 79 | 88.0 | 104 | 88.1 | B011 | 79 | 88.0 | 104 |
| B012 | 118 | 88.4 | 77 | 91.2 | B012 | 118 | 88.4 | 77 |
| B013 | 68 | 88.8 | 58 | 93.4 | B013 | 68 | 88.8 | 58 |
| B014 | 84 | 88.1 | 70 | 93.2 | B014 | 84 | 88.1 | 70 |
| C051 | 170 | 80.1 | 53 | 93.2 | C051 | 170 | 80.1 | 53 |

TABLE B
siRNA sequence information.

| | | | Target start |
|---|---|---|---|
| | | | position in |
| | # of | | human PCSK9 |
| | Mismatches | | mRNA |
| | to macaque | Sense strand target | (NM_174936; |
| siRNA | PCSK9 | sequence (5′→3′) | SEQ ID NO: 1) |
| B001 | 0 | UUGUAGCAUUUUUAUUAAU | 3649 |
| | | (SEQ ID NO: 3) | |
| B003 | 0 | GUAGCAUUUUUAUUAAUAU | 3651 |
| | | (SEQ ID NO: 4) | |
| B006 | 1 | GCAUUUUUAUUAAUAUGGU | 3654 |
| | | (SEQ ID NO: 5) | |
| B008 | 1 | UUUUAUUAAUAUGGUGACU | 3658 |
| | | (SEQ ID NO: 6) | |
| B010 | 1 | UAUUAAUAUGGUGACUUUU | 3661 |
| | | (SEQ ID NO: 7) | |
| B011 | 1 | AUUAAUAUGGUGACUUUUU | 3662 |
| | | (SEQ ID NO: 8) | |
| B012 | 1 | UUAAUAUGGUGACUUUUUA | 3663 |
| | | (SEQ ID NO: 9) | |
| B013 | 1 | UAAUAUGGUGACUUUUUAA | 3664 |
| | | (SEQ ID NO: 10) | |
| B014 | 1 | UAUGGUGACUUUUUAAAAU | 3667 |
| | | (SEQ ID NO: 11) | |
| C051 | 1 | GAGUGUGAAAGGUGCUGAU | 2891 |
| | | (SEQ ID NO: 13) | |

[0368] As compared with the 14 siRNAs described in Example 1, these 60 siRNAs had a significantly lower proportion of those effective at knocking down hPCSK9 expression (5/60 were effective in Hep3B cells, as compared to 9/14 from Example 1). Without wishing to be bound to theory, it is thought that the siRNAs from Example 1 may exhibit higher efficacy due to their lower G+C content and/or the specific region of PCSK9 targeted (e.g., the 3′ UTR). Taken together, these results further illustrate the unpredictability of effective siRNA knockdown of human PCSK9 expression. Moreover, the results obtained using the 60 siRNA sequences further underscore the efficacy and low level of cytotoxicity of the siRNAs described in Example 1.

### Example 3: In Vitro and In Vivo Evaluation of PCSK9 siRNA Molecules

[0369] Methods

[0370] siRNA Production

[0371] siRNAs, including negative control siRNAs, were produced using solid phase oligonucleotide synthesis.

[0372] Cells and Tissue Culture

[0373] Human C3A cells were grown at 37° C., 5% CO₂ and 95% RH, and cultivated in MEM medium (ThermoFisher, cat. no. 41090) supplemented with 10% FBS.

[0374] Human peripheral blood mononuclear cells (PBMCs) were isolated from approximately 16 mL of blood from three healthy donors that were collected in Vacutainer tubes coated with sodium heparin (BD, Heidelberg Germany) according to manufacturer's instructions.

[0375] Primary human and cynomolgus hepatocytes were cultured as follows: cryopreserved cells were thawed and plated using a Plating and Thawing Kit (PTK-1, Primacyt), and were incubated at 37° C., 5% CO₂ and 95% RH. 6 hours after plating, the medium was changed to maintenance medium (KLC-MM, KaLy-Cell) supplemented with 1% FBS.

[0376] Transfections

[0377] For knock-down experiments in C3A cells, 25,000 cells/well were used in a 96-well plate. The cells were transfected with the indicated concentration of siRNAs using 0.2 μl/well of Lipofectamine® RNAiMAX transfection reagent (ThermoFisher) according to the manufacturer's protocol in a reverse transfection setup and incubated for 48 h without medium change. Usually, N=4 technical replicates were carried out per test sample.

[0378] For transfection of human PBMCs, 100 nM of the siRNAs were reverse transfected into 1×10⁵ PBMCs with 0.3 μL Lipofectamine 2000 per 96-well (n=2) in a total volume of 150 μL serum-free RPMI medium for 24 hours. Single stranded RNA (“R-0006”) and DNA (“CpG ODN”) oligonucleotides, as well as double stranded unmodified and 2′-O-methyl modified siRNA (“132/161”) were applied as controls. mRNA expression analysis

[0379] 48 hours after siRNA transfection or 72 hours after free siRNA uptake, the cellular RNA was harvested by usage of Promega's SV96 total RNA isolation system (cat. no. Z3500) according to the manufacturer's protocol including a DNase step during the procedure.

[0380] For cDNA synthesis the Reverse Transcriptase kit (cat. no. N8080234) was used from ThermoFisher. cDNA synthesis from 30 ng RNA was performed using 1.2 μl 10×RT buffer, 2.64 μl MgCl₂ (25 mM), 2.4 μl dNTPs (10 mM), 0.6 μl random hexamers (50 μM), 0.6 μl Oligo(dT)16 (50 μM), 0.24 μl RNase inhibitor (20 U/μl) and 0.3 μl Multiscribe (50 U/μl) in a total volume of 12 μl. Samples were incubated at 25° C. for 10 minutes and 42° C. for 60 minutes. The reaction was stopped by heating to 95° C. for 5 minutes.

[0381] PCSK9 mRNA levels were quantified by qPCR using the ThermoFisher TaqMan Universal PCR Master Mix (cat. no. 4305719) and the TaqMan® Gene Expression assays Hs00545399_m1 and Mf03418189_m1 for human and cynomolgus samples, respectively. PCR was performed in technical duplicates with the ABI Prism 7900 under the following PCR conditions: 2 minutes at 50° C., 10 minutes at 95° C., 40 cycles with 95° C. for 15 seconds and 1 minute at 60° C. PCR was set up as a simplex PCR detecting the target gene (PCSK9) in one reaction and the housekeeping gene (RPL37A) for normalization in a second reaction. The final volume for the PCR reaction was 12.5 μl in a 1×PCR master mix, RPL37A primers were used in a final concentration of 50 nM and the probe of 200 nM. The ΔΔCt method was applied to calculate relative expression levels of the target transcripts. Percentage of PCSK9 expression was calculated by normalization based on the levels of the LV2 non-silencing siRNA control sequence.

[0382] IC₅₀ Measurements

[0383] C3A cells were transfected with the indicated siRNAs at concentrations ranging from 25 nM-0.1 pM using 8-fold dilution steps. The half maximal inhibitory concentration (IC₅₀) for each siRNA was calculated by applying a Biostat-Speed statistical calculation tool. Results were obtained using the 4-parameter logistic model according to Ratkovsky and Reedy (1986). The adjustment was obtained by non-linear regression using the Levenberg-Marquardt algorithm in SAS v9.1.3 software.

[0384] For IC₅₀ measurements in primary human and cynomolgus hepatocytes, 70,000 cells in 96-well plates were incubated for 72 hours under free uptake conditions with the siRNAs at concentrations ranging from 10 μM-0.005 nM using 5-fold dilution steps.

[0385] ELISA Assays

[0386] PCSK9 protein concentration was quantified in the supernatant of C3A cells 48 hours after transfection with the indicated concentrations of siRNAs by R&D Systems' human PCSK9 Quantikine ELISA kit (cat. no. DPC900). The ELISA assays were performed using 50 μl of undiluted cell culture supernatant according to the manufacturer's protocol. Percentage of PCSK9 expression was calculated by normalization based on the mean levels of non-silencing siRNA control sequences.

[0387] IFNα protein concentration was quantified in the supernatant of PBMCs as follows: 25 μL of the cell culture supernatant was used for measurement of IFNα concentration applying a self-established electrochemiluminescence assay based on MesoScale Discovery's technology, and using a pan IFNα monoclonal capture antibody (MT1/3/5, Mabtech).

[0388] Cytotoxicity

[0389] Cytotoxicity of each siRNA was measured 72 hours after incubation with 50,000 primary human hepatocytes under free uptake conditions by determining the ratio of cellular viability/toxicity in each sample. Cell viability was measured by determination of the intracellular ATP content using the CellTiter-Glo® assay (Promega, cat. no. G7570) according to the manufacturer's protocol. Cell toxicity was measured in the supernatant using the ToxiLight™ assay (Lonza, cat. no. LT07-217) according to the manufacturer's protocol.

[0390] Nuclease Stability

[0391] The siRNAs were tested for nuclease stability in 50% mouse serum. For this purpose, 160 μL mouse serum (Sigma, cat. No. M5905) was incubated at 37° C. for 0, 8, 24, 32, 48, 56, and 72 hours. At each time point, 21 μL of the reaction was taken out and quenched with 23 μL stop solution (for 3,000 μL stop solution: 1123 μL Tissue & Cell Lysis Solution (Epicentre, cat. No. MTC096H), 183 μL 20 mg/mL Proteinase K (Sigma, cat. No. P2308), 1694 μL water) at 65° C. for 30 minutes. Prior to HPLC analysis on a Waters 2695 Separation Module and a 2487 Dual Absorbance Detector, 33 μL of RNase-free water was added to each sample. 50 μL of the solution was analyzed by HPLC using a DNAPac PA200 analytical column (Thermo Scientific, cat. No. 063000), and the following gradient:

| Time (min) | Flow (mL/min) | % Buffer A* | % Buffer B** |
|---|---|---|---|
| 0 | 1 | 75 | 25 |
| 20 | 1 | 35 | 65 |

*Buffer A: 20 mM sodium phosphate (Sigma, cat. No. 342483), pH 11;
**Buffer B: 20 mM sodium phosphate (Sigma, cat. No. 342483), 1M sodium bromide (Sigma, cat. No. 02119), pH 11.

[0392] Mouse Model

[0393] The female mice used in the following experiments carried a transgene encoding full-length human PCSK9, and were knockouts for the corresponding mouse PCSK9. The transgenic model, strain “hTg-mKO line #2”, was in-licensed from IRCM (Institut de Recherches Cliniques do Montréal) via Univalor Inc.

[0394] In Vivo Measurements

[0395] Serum PCSK9 levels in mice treated with siRNAs were determined using the same R&D Systems' human PCSK9 Quantikine ELISA kit (Cat. No. DPC900) with 1:40 pre-dilutions. Relative PCSK9 serum levels were calculated to pre-dosing values.

[0396] Serum total and LDL cholesterol levels in transgenic mice treated with PCSK9 siRNAs were determined with a COBAS INTEGRA instrument and Roche's LDLC3 assay or Horiba's ABX Pentra LDL Direct CP assay.

[0397] Serum AST, ALT, and BUN levels were determined using standard clinical chemistry assays with a COBAS INTEGRA instrument.

[0398] Results

[0399] The 10 PCSK9 siRNA sequences as shown in Tables A and B were conjugated and characterized in vitro. IC₅₀ measurements were taken for the siRNAs using human C3A cells (Table C). IC₅₀ values in human C3A cells transfected with the indicated siRNAs ranged from 9.7-125.0 pM.

TABLE C
IC₅₀ activities of 10 siRNAs in human C3A cells

| siRNA: | IC₅₀ (pM): | Iₘₐₓ %: |
|---|---|---|
| C032.001 | 114.0 | 79.6 |
| C032.004 | 76.3 | 86.1 |
| C032.005 | 23.7 | 88.4 |
| C032.006 | 70.9 | 87.4 |
| C032.007 | — | 84.6 |
| C032.008 | 88.1 | 83.2 |
| C032.009 | 125.0 | 86.3 |
| C032.010 | 9.7 | 86.7 |
| C032.011 | 15.4 | 89.6 |
| C032.012 | 12.7 | 90.3 |

[0400] PCSK9 protein knockdown was confirmed by quantification of PCSK9 levels in the supernatants of the C3A cells transfected with three different concentrations (25, 0.39, and 0.0061 nM) of the siRNAs (FIG. 8).

[0401] The IC₅₀ of each siRNA was also measured using free uptake into primary cells. Primary cynomolgus monkey hepatocytes were treated with the siRNAs, and the IC₅₀ for each siRNA was calculated (Table D). IC₅₀ values ranged from 94.2-486.0 nM. siRNA sequences C032.004 and C032.005 (without a mismatch to the cynomolgus PCSK9) showed good dose-dependent knockdown activity, and, to a lesser extent, so did sequence C032.012 (with one mismatch to macaque species).

TABLE D
IC₅₀ activities of 10 siRNAs in primary cynomolgus
hepatocytes under free uptake conditions

| siRNA: | IC₅₀ (nM): | Iₘₐₓ %: | Comment: |
|---|---|---|---|
| C032.001 | n.a. | n.a. | 1 MM cyno |
| C032.004 | 94.2 | 55.8 | 0 MM cyno |
| C032.005 | 117.0 | 66.7 | 0 MM cyno |
| C032.006 | n.a. | n.a. | 1 MM cyno |
| C032.007 | n.a. | n.a. | 1 MM cyno |
| C032.008 | n.a. | n.a. | 1 MM cyno |
| C032.009 | n.a. | n.a. | 1 MM cyno |
| C032.010 | n.a. | n.a. | 1 MM cyno |
| C032.011 | n.a. | n.a. | 1 MM cyno |
| C032.012 | 486.0 | 30.9 | 1 MM cyno |

n.a. = not active
MM = mismatch

[0402] Primary human hepatocytes were also treated with the siRNAs, and the IC₅₀ for each siRNA was calculated in this primary human cell type (Table E). IC₅₀ values ranges from 9.4-189.0 nM. The cytotoxicity of the siRNAs was also examined in this primary human cell type under free uptake conditions (FIG. 9). No dose-dependent cytotoxic effects were observed for any of the tested siRNAs.

TABLE E
IC₅₀ activities of 10 siRNAs in primary human
hepatocytes under free uptake conditions

| siRNA: | IC₅₀ (nM): | Iₘₐₓ %: |
|---|---|---|
| C032.001 | 36.3 | 70.9 |
| C032.004 | 14.6 | 56.7 |
| C032.005 | 16.7 | 64.4 |
| C032.006 | 17.2 | 61.4 |
| C032.007 | 27.7 | 72.6 |
| C032.008 | 9.4 | 54.1 |
| C032.009 | 189.0 | 35.4 |
| C032.010 | 34.7 | 50.6 |
| C032.011 | 17.6 | 61.6 |
| C032.012 | 11.7 | 72.3 |

[0403] The immune response to the siRNAs was measured in primary human cells by examining the production of interferon α secreted from human primary PMBCs isolated from three different healthy donors (FIG. 10) in response to transfection of the siRNAs. No signs of immune stimulation in human PBMCs were observed for any of the tested siRNAs.

[0404] The 10 PCSK9 siRNAs were also tested for their in vitro nuclease stability in 50% murine serum, and the relative stability and half-lives were determined (FIG. 11). Whereas all siRNAs were stable for at least 24 hours, compound C032.005 was identified as most stable with little or no degradation at the latest time point measured (72 hours).

[0405] A summary of the results from the in vitro analyses is shown in FIG. 12. Next, the in vivo effects on serum PCSK9 protein levels (FIG. 13A), as well as serum total cholesterol levels (FIG. 13B), were examined for a single subcutaneous injection of 10 mg/kg of the 10 conjugated siRNAs, as compared to non-silencing control siRNA. The mice used in the in vivo efficacy experiments carried a transgene encoding full-length human PCSK9, and were knockouts for the corresponding mouse PCSK9. siRNAs C032.005, C032.007, and C032.012 had a nearly identical pattern on PCSK9 reduction, with maximum PCSK9 knockdown of approximately 49-52% between days 3 and 7, with a return to baseline between days 17 and 21. siRNA C032.006 was most active on PCSK9 levels with a maximum knockdown of 65% at day 10, a return to baseline levels at day 52. The highest reduction of total cholesterol levels was obtained using siRNA C032.005 and C032.012, with a maximum reduction of 19% and 22%, respectively. Interestingly, no major effect on cholesterol levels was observed for siRNA C032.006 even though it has the greatest effect on PCSK9 levels.

[0406] At day 3 (FIG. 13C) and 10 (FIG. 13D) of the same in vivo study in the human PCSK9 transgenic mice, acute toxicology parameters were measured in serum samples. No obvious hepatic (as determined by AST and ALT levels) or renal (as determined by BUN levels) toxicities were detected with any of the compounds tested. Taken together, the good in vitro profile of PCSK9 siRNA C032.012 also translated to the in vivo setting in a relevant transgenic mouse model. Furthermore, siRNA C032.005 exhibited a good in vivo profile on PCSK9 and total cholesterol inhibition. Two additional siRNAs, C032.006 and C032.007, were identified with potent PCSK9 inhibition in vivo, but interestingly, these two siRNAs had no major effect on lowering cholesterol levels.

### Example 4: In Vitro Evaluation of Additional Test PCSK9 siRNA Molecules

[0407] Methods

[0408] Unless indicated otherwise, all experiments were carried out as described in the examples above.

[0409] Results

[0410] An additional set of siRNAs targeting PCSK9 were designed using a looser off-target filter criterion, as well as allowing for greater variation in siRNA length (19, 21, and 23mers), and these additional siRNAs were synthesized. Their ability to knock down PCSK9 mRNA expression in human Hep3B (FIG. 14A), and human C3A cells (FIG. 14B) was next tested using 0.1 and 1 nM siRNA transfections. The relative cytotoxicity of the transfected siRNAs was also tested in these two human cell types at 5 and 50 nM concentrations (FIG. 15). A toxic effect was observed in both human cell types when treated with the siRNA C209.021. The IC₅₀ values of the siRNAs were calculated for the 15 most active and non-toxic sequences using the human Hep3B cells (Table F) and human C3A cells (Table G). IC₅₀ values in human Hep3B cells ranged from 3.3-45.2 pM, while IC₅₀ values in human C3A cells ranged from 14.1-102.0 pM. The best maximum knockdown in both cell types was obtained using siRNA C209.016.

TABLE F
IC₅₀ activities of additional PCSK9
siRNAs in Hep3B cells

| siRNA: | IC₅₀ (pM): | Iₘₐₓ %: |
|---|---|---|
| C217.001 | 39.8 | 93.0 |
| C217.011 | 26.7 | 95.1 |
| C217.013 | 32.6 | 95.7 |
| C217.014 | 5.2 | 92.4 |
| C218.003 | 32.4 | 89.8 |
| C218.005 | 27.9 | 95.2 |
| C218.006 | 34.3 | 88.9 |
| C218.008 | 3.3 | 91.8 |
| C218.012 | 4.2 | 95.2 |
| C219.001 | 11.8 | 90.4 |
| C219.003 | 21.2 | 95.2 |
| C219.004 | 32.0 | 91.9 |
| C219.006 | 45.2 | 87.9 |
| C219.007 | 32.1 | 93.0 |
| C209.016 | 4.9 | 96.6 |
| S48694 (Ambion) | 6.6 | 95.1 |

TABLE G
IC₅₀ activities of additional PCSK9
siRNAs in C3A cells

| siRNA: | IC₅₀ (pM): | Iₘₐₓ %: |
|---|---|---|
| C217.001 | 102.0 | 94.4 |
| C217.011 | 50.7 | 93.4 |
| C217.013 | 31.0 | 92.0 |
| C217.014 | 17.4 | 93.4 |
| C218.003 | 40.8 | 92.2 |
| C218.005 | 46.7 | 95.7 |
| C218.006 | 49.7 | 90.3 |
| C218.008 | 51.4 | 91.9 |
| C218.012 | 33.2 | 94.4 |
| C219.001 | 33.8 | 88.9 |
| C219.003 | 86.3 | 95.3 |
| C219.004 | 66.1 | 93.5 |
| C219.006 | 73.4 | 93.1 |
| C219.007 | 65.4 | 94.2 |
| C209.016 | 14.1 | 96.8 |
| S48694 (Ambion) | 41.5 | 91.4 |

[0411] Finally, a comparison was made to understand the correlation between the calculated IC₅₀ values (FIG. 16A) in the Hep3B vs. C3A cells, as well as the correlation between the Iₘₐₓ values (FIG. 16B) in these two cell types.

[0412] Taken together, the data provided in this example show that two additional PCSK9 siRNA sequences, C209.016 and C218.012, had a good activity profile in all of the in vitro assays applied. C218.012 represents a nucleotide extended sequence as compared to C032.012.

### Example 5: Lead Optimization of GalNAc-Conjugated PCSK9 siRNA Sequences

[0413] Methods

[0414] Unless indicated otherwise, all experiments were carried out as described in the examples above. GalNAc-siRNAs, including those comprising nucleotide analogs described above, were generated based on the indicated sequences (see sequence listings above) as described in WO 2019/170731.

[0415] Results

[0416] Based on the results from Examples 3 and 4, three parent PCSK9 siRNA sequences were selected (siRNA IDs B014/C032.012/C217.014, B006/C032.006/C217.001, and C209.016/C217.007) and each molecule synthesized with three consecutive, GalNAc-conjugated nucleotide analogs at the 5′ end of respective siRNA sense strands (siRNA IDs C027.001, C027.002, and C027.003; Table 4 above). The parent sequences of siRNA IDs C027.001, C027.002, and C027.003 were then used for an optimization campaign that included 66 different chemical modifications per siRNA sequence. The resulting sequences and modification pattern are shown in Table 4, above.

[0417] The in vitro activity of these optimization libraries was tested in cryopreserved primary human hepatocytes under free uptake conditions using 10 nM, 100 nM, and 1000 nM concentrations of PCSK9 GalNAc-siRNAs. As depicted in FIG. 17, the optimization libraries based on parent sequences C027.001 and C027.003 were identified to exhibit higher overall in vitro activities as compared to parent sequence C027.002. Of note, numerous modification patterns were identified that strongly impaired the siRNA activity of the molecule, in particular for parent sequence C027.002. On the other hand, a large number of sequence modifications were identified that led to improved knockdown activities as compared to the respective parent molecules.

[0418] In order to evaluate improved stability features of the optimized PCSK9 GalNAc-siRNAs, the optimization libraries were assayed for their in vitro half-lives in 50% mouse serum. As demonstrated in Table H, a large number of modifications were identified with improved nuclease stability as compared to the respective parent molecules which was most evident for the optimization library of parent siRNA ID C027.001.

TABLE H
Nuclease stability of optimized PCSK9 GalNAc-siRNA
constructs in 50% mouse serum

| siRNA ID | t_{1/2} |
|---|---|
| C027.001 (parent) | >24 h |
| C027.001#01 | 168 h |
| C027.001#02 | 168 h |
| C027.001#03 | 168 h |
| C027.001#04 | 168 h |
| C027.001#05 | >48 h |
| C027.001#06 | >72 h |
| C027.001#07 | 168 h |
| C027.001#08 | 168 h |
| C027.001#09 | >72 h |
| C027.001#10 | >72 h |
| C027.001#11 | >96 h |
| C027.001#12 | >168 h |
| C027.001#13 | 96 h |
| C027.001#14 | 96 h |
| C027.001#15 | >24 h |
| C027.001#16 | 96 h |
| C027.001#17 | 96 h |
| C027.001#18 | 96 h |
| C027.001#19 | 96 h |
| C027.001#20 | 96 h |
| C027.001#21 | 168 h |
| C027.001#22 | 96 h |
| C027.001#23 | 96 h |
| C027.001#24 | >48 h |
| C027.001#25 | >72 h |
| C027.001#26 | 96 h |
| C027.001#27 | 96 h |
| C027.001#28 | 96 h |
| C027.001#29 | 96 h |
| C027.001#30 | 96 h |
| C027.001#31 | 96 h |
| C027.001#32 | 96 h |
| C027.001#33 | >48 h |
| C027.001#34 | 48 h |
| C027.001#35 | 48 h |
| C027.001#36 | 48 h |
| C027.001#37 | 48 h |
| C027.001#38 | 48 h |
| C027.001#39 | 96 h |
| C027.001#40 | 168 h |
| C027.001#41 | 96 h |
| C027.001#42 | 96 h |
| C027.001#43 | >24 h |
| C027.001#44 | 96 h |
| C027.001#45 | 96 h |
| C027.001#46 | 96 h |
| C027.001#47 | 96 h |
| C027.001#48 | 96 h |
| C027.001#49 | 96 h |
| C027.001#50 | 96 h |
| C027.001#51 | 168 h |
| C027.001#52 | >48 h |
| C027.001#53 | >96 h |
| C027.001#54 | >96 h |
| C027.001#55 | >96 h |
| C027.001#56 | >96 h |
| C027.001#57 | 96 h |
| C027.001#58 | 96 h |
| C027.001#59 | 96 h |
| C027.001#60 | 96 h |
| C027.001#61 | >72 h |
| C027.001#62 | >96 h |
| C027.001#63 | >96 h |
| C027.001#64 | 96 h |
| C027.001#65 | 96 h |
| C027.001#66 | >96 h |
| C027.002 (parent) | >72 h |
| C027.002#01 | 96 h |
| C027.002#02 | 96 h |
| C027.002#03 | 96 h |
| C027.002#04 | 96 h |
| C027.002#05 | >72 h |
| C027.002#06 | >96 h |
| C027.002#07 | >72 h |
| C027.002#08 | >96 h |
| C027.002#09 | 96 h |
| C027.002#10 | >72 h |
| C027.002#11 | 96 h |
| C027.002#12 | >72 h |
| C027.002#13 | >72 h |
| C027.002#14 | >96 h |
| C027.002#15 | >48 h |
| C027.002#16 | >72 h |
| C027.002#17 | 96 h |
| C027.002#18 | 96 h |
| C027.002#19 | >72 h |
| C027.002#20 | 96 h |
| C027.002#21 | 96 h |
| C027.002#22 | 96 h |
| C027.002#23 | 96 h |
| C027.002#24 | 96 h |
| C027.002#25 | 96 h |
| C027.002#26 | 96 h |
| C027.002#27 | 96 h |
| C027.002#28 | 96 h |
| C027.002#29 | >72 h |
| C027.002#30 | >72 h |
| C027.002#31 | 72 h |
| C027.002#32 | 72 h |
| C027.002#33 | 72 h |
| C027.002#34 | 72 h |
| C027.002#35 | >72 h |
| C027.002#36 | >96 h |
| C027.002#37 | 72 h |
| C027.002#38 | 96 h |
| C027.002#39 | 72 h |
| C027.002#40 | 72 h |
| C027.002#41 | 72 h |
| C027.002#42 | >96 h |
| C027.002#43 | 72 h |
| C027.002#44 | >96 h |
| C027.002#45 | >168 h |
| C027.002#46 | >72 h |
| C027.002#47 | >96 h |
| C027.002#48 | 72 h |
| C027.002#49 | >96 h |
| C027.002#50 | 72 h |
| C027.002#51 | >72 h |
| C027.002#52 | >48 h |
| C027.002#53 | 72 h |
| C027.002#54 | 96 h |
| C027.002#55 | >96 h |
| C027.002#56 | >96 h |
| C027.002#57 | 96 h |
| C027.002#58 | >72 h |
| C027.002#59 | >96 h |
| C027.002#60 | >96 h |
| C027.002#61 | >48 h |
| C027.002#62 | >72 h |
| C027.002#63 | 96 h |
| C027.002#64 | >96 h |
| C027.002#65 | >96 h |
| C027.002#66 | >48 h |
| C027.003 (parent) | 48 h |
| C027.003#01 | >48 h |
| C027.003#02 | >48 h |
| C027.003#03 | >48 h |
| C027.003#04 | >48 h |
| C027.003#05 | 24 h |
| C027.003#06 | 72 h |
| C027.003#07 | >48 h |
| C027.003#08 | >72 h |
| C027.003#09 | 48 h |
| C027.003#10 | >48 h |
| C027.003#11 | >48 h |
| C027.003#12 | >48 h |
| C027.003#13 | >48 h |
| C027.003#14 | >48 h |
| C027.003#15 | 24 h |
| C027.003#16 | >48 h |
| C027.003#17 | >48 h |
| C027.003#18 | >48 h |
| C027.003#19 | >48 h |
| C027.003#20 | >48 h |
| C027.003#21 | >48 h |
| C027.003#22 | >48 h |
| C027.003#23 | >48 h |
| C027.003#24 | >24 h |
| C027.003#25 | >24 h |
| C027.003#26 | >24 h |
| C027.003#27 | >48 h |
| C027.003#28 | >24 h |
| C027.003#29 | >48 h |
| C027.003#30 | >48 h |
| C027.003#31 | >48 h |
| C027.003#32 | >48 h |
| C027.003#33 | >48 h |
| C027.003#34 | >48 h |
| C027.003#35 | >48 h |
| C027.003#36 | >48 h |
| C027.003#37 | >24 h |
| C027.003#38 | >24 h |
| C027.003#39 | >48 h |
| C027.003#40 | >24 h |
| C027.003#41 | >48 h |
| C027.003#42 | >24 h |
| C027.003#43 | >24 h |
| C027.003#44 | >48 h |
| C027.003#45 | >24 h |
| C027.003#46 | >48 h |
| C027.003#47 | >48 h |
| C027.003#48 | 48 h |
| C027.003#49 | 48 h |
| C027.003#50 | >48 h |
| C027.003#51 | >24 h |
| C027.003#52 | 24 h |
| C027.003#53 | 48 h |
| C027.003#54 | >24 h |
| C027.003#55 | >48 h |
| C027.003#56 | >48 h |
| C027.003#57 | >48 h |
| C027.003#58 | >48 h |
| C027.003#59 | >48 h |
| C027.003#60 | >48 h |
| C027.003#61 | >48 h |
| C027.003#62 | >48 h |
| C027.003#63 | >48 h |
| C027.003#64 | >48 h |
| C027.003#65 | >48 h |
| C027.003#66 | >48 h |

[0419] Prior to in vivo activity testing, 14 siRNA modifications were selected for each of the three different parent sequences of siRNA IDs C027.001, C027.002 and C027.003 based on siRNA activity, stability as well as chemical considerations. The immune stimulatory potential was measured in the human PBMC assay using IFNα2a secretion to the supernatant as readout (FIG. 18). No signs of immune stimulation in human PBMCs were observed for any of the tested PCSK9 GalNAc-siRNAs.

[0420] Next, in total 42 out of 198 optimized PCSK9 GalNAc-siRNAs based on the three different parent sequences were used for in vivo pharmacology testing in human PCSK9 transgenic mice and compared to the respective parent molecules C027.001, C027.002 and C027.003 (FIGS. 19A-C). After subcutaneous administration of the selected compounds at a single 6 mg/kg dose, maximum target PCSK9 protein knockdown (KDₘₐₓ) of 86% (C027.001#58), 62% (C027.002#19) and 82% (C027.003#08) were achieved between day 7 and 14 for the three respective optimization libraries when compared to animals treated with PBS vehicle control. The gain of in vivo activity was most striking for the libraries of parent sequences C027.001 and C027.003 which exhibited KDₘₐₓ values of 32% and 31%, respectively and a return to baseline 3 weeks after dosing. Interestingly, the potency gain for the library of parent sequence C027.002 (KDₘₐₓ=52%) was less pronounced. This was also reflected on KD₅₀ level (50% of maximum knockdown) which was reached at day ˜20 for the best molecule of library C027.002 (C027.002#19). Instead, libraries C027.001 and C027.003 reached KD₅₀ at days ˜26 and ˜30, respectively for molecules C027.001#40 and C027.003#08. Molecules identified with the best overall in vivo pharmacology profile on PCSK9 level (KDₘₐₓ and KD₅₀) in this study were C027.001#40, C027.001#58, C027.003#03, C027.003#06, C027.003#08 and C027.003#47.

[0421] In the same study serum LDL cholesterol (LDL-c) was measured at days 14 and 28 after siRNA dosing (FIGS. 19D and 19E). This analysis confirmed the identification of a large number of optimized molecules with an improved in vivo pharmacology profile as compared to the respective parent sequences. A maximum LDL-c reduction of 32% was achieved for siRNA ID C027.003#06 at day 14 after dosing.

[0422] A summary of selected siRNAs used in the examples is shown in Table I below.

TABLE I
siRNAs used in the examples.

| | | | Target start |
|---|---|---|---|
| | | | position in |
| | | | human PCSK9 |
| siRNA | | SEQ ID | mRNA |
| name(s) | Target sequence (5′→3′) | NO. | (NM_174936.3) |
| B001; | UUGUAGCAUUUUUAUUAAU | 3 | 3649 |
| C032.004 | | | |
| B003; | GUAGCAUUUUUAUUAAUAU | 4 | 3651 |
| C032.005 | | | |
| B006; | GCAUUUUUAUUAAUAUGGU | 5 | 3654 |
| C032.006; | | | |
| C217.001; | | | |
| C027.002 | | | |
| B008; | UUUUAUUAAUAUGGUGACU | 6 | 3658 |
| C032.007 | | | |
| B010; | UAUUAAUAUGGUGACUUUU | 7 | 3661 |
| C032.008 | | | |
| B011; | AUUAAUAUGGUGACUUUUU | 8 | 3662 |
| C032.009 | | | |
| B012; | UUAAUAUGGUGACUUUUUA | 9 | 3663 |
| C032.010 | | | |
| B013; | UAAUAUGGUGACUUUUUAA | 10 | 3664 |
| C032.011; | | | |
| C217.011 | | | |
| B014; | UAUGGUGACUUUUUAAAAU | 11 | 3667 |
| C032.012; | | | |
| C217.014; | | | |
| C027.001 | | | |
| C051; | GAGUGUGAAAGGUGCUGAU | 13 | 2891 |
| C032.001 | | | |
| C209.016; | UUAUUAAUAUGGUGACUUU | 310 | 3660 |
| C217.007; | | | |
| C027.003 | | | |
| C217.013 | AUAUGGUGACUUUUUAAAA | 311 | 3656 |
| C218.003 | AUUUUUAUUAAUAUGGUGACU | 312 | 3656 |
| C218.005 | UUUUAUUAAUAUGGUGACUUU | 313 | 3658 |
| C218.006 | UUUAUUAAUAUGGUGACUUUU | 314 | 3659 |
| C218.008 | UAUUAAUAUGGUGACUUUUUA | 315 | 3661 |
| C218.012 | AAUAUGGUGACUUUUUAAAAU | 316 | 3665 |
| C219.001 | GCAUUUUUAUUAAUAUGGUGACU | 317 | 3654 |
| C219.003 | AUUUUUAUUAAUAUGGUGACUUU | 318 | 3656 |
| C219.004 | UUUUUAUUAAUAUGGUGACUUUU | 319 | 3657 |
| C219.006 | UUUAUUAAUAUGGUGACUUUUUA | 320 | 3659 |
| C219.007 | UUAUUAAUAUGGUGACUUUUUAA | 321 | 3660 |

(1) CCAUUUUAUUAAUAUGGUGACUinvdT (SEQ ID NO: 176) in the sense
strand and AGUCACCAUAUUAAUAAAAdTdT (SEQ ID NO: 177) in the antisense strand,
(2) CCAUAUUAAUAUGGUGACUUUUinvdT (SEQ ID NO: 180) in the sense
strand and AAAAGUCACCAUAUUAAUAdTdT (SEQ ID NO: 181) in the antisense strand,
(3) CCAAUUAAUAUGGUGACUUUUUinvdT (SEQ ID NO: 182) in the sense
strand and AAAAAGUCACCAUAUUAAUdTdT (SEQ ID NO: 183) in the antisense strand,
(4) CCAUUAAUAUGGUGACUUUUUAinvdT (SEQ ID NO: 184) in the sense
strand and UAAAAAGUCACCAUAUUAAdTdT (SEQ ID NO: 185) in the antisense strand,
(5) CCAUAAUAUGGUGACUUUUUAAinvdT (SEQ ID NO: 186) in the sense
strand and UUAAAAAGUCACCAUAUUAdTdT (SEQ ID NO: 187) in the antisense strand,
(6) CCAUAUGGUGACUUUUUAAAAUinvdT (SEQ ID NO: 188) in the sense
strand and AUUUUAAAAAGUCACCAUAdTdT (SEQ ID NO: 189) in the antisense strand,
(7) CCAUUAUUAAUAUGGUGACUUUinvdT (SEQ ID NO: 322) in the sense
strand and AAAGUCACCAUAUUAAUAAdTdT (SEQ ID NO: 323) in the antisense strand,
(8) CCAAUAUGGUGACUUUUUAAAAinvdT (SEQ ID NO: 324) in the sense
strand and UUUUAAAAAGUCACCAUAUdtdt (SEQ ID NO: 325) in the antisense strand,
(9) CCAAUUUUUAUUAAUAUGGUGACUinvdT (SEQ ID NO: 326) in the
sense strand and AGUCACCAUAUUAAUAAAAAUdTdT (SEQ ID NO: 327) in the
antisense strand,
(10) CCAUUUUAUUAAUAUGGUGACUUUinvdT (SEQ ID NO: 328) in the
sense strand and AAAGUCACCAUAUUAAUAAAAdTdT (SEQ ID NO: 329) in the
antisense strand,
(11) CCAUUUAUUAAUAUGGUGACUUUUinvdT (SEQ ID NO: 330) in the
sense strand and AAAAGUCACCAUAUUAAUAAAdTdT (SEQ ID NO: 331) in the
antisense strand,
(12) CCAUAUUAAUAUGGUGACUUUUUAinvdT (SEQ ID NO: 332) in the
sense strand and UAAAAAGUCACCAUAUUAAUAdTdT (SEQ ID NO: 333) in the
antisense strand,
(13) CCAAAUAUGGUGACUUUUUAAAAUinvdT (SEQ ID NO: 334) in the
sense strand and AUUUUAAAAAGUCACCAUAUUdTdT (SEQ ID NO: 335) in the
antisense strand,
(14) CCAGCAUUUUUAUUAAUAUGGUGACUinvdT (SEQ ID NO: 336) in the
sense strand and AGUCACCAUAUUAAUAAAAAUGCdTdT (SEQ ID NO: 337) in the
antisense strand,
(15) CCAAUUUUUAUUAAUAUGGUGACUUUinvdT (SEQ ID NO: 338) in the
sense strand and AAAGUCACCAUAUUAAUAAAAAUdTdT (SEQ ID NO: 339) in the
antisense strand,
(16) CCAUUUUUAUUAAUAUGGUGACUUUUinvdT (SEQ ID NO: 340) in the
sense strand and AAAAGUCACCAUAUUAAUAAAAAdTdT (SEQ ID NO: 341) in the
antisense strand,
(17) CCAUUUAUUAAUAUGGUGACUUUUUAinvdT (SEQ ID NO: 342) in the
sense strand and UAAAAAGUCACCAUAUUAAUAAAdTdT (SEQ ID NO: 343) in the
antisense strand, or
(18) CCAUUAUUAAUAUGGUGACUUUUUAAinvdT (SEQ ID NO: 344) in the
sense strand and UUAAAAAGUCACCAUAUUAAUAAdTdT (SEQ ID NO: 345) in the
antisense strand.

[0423] Although the foregoing disclosure has been described in some detail by way of illustration and example for purposes of clarity of understanding, the descriptions and examples should not be construed as limiting the scope of the present disclosure.

The application's sequence listing, which the Patent Office published only in electronic form, follows.

SEQUENCE LISTING (640 sequences)

SEQ ID NO: 1 - DNA, 3731 bp, Homo sapiens
gtccgatggggctctggtggcgtgatctgcgcgccccaggcgtcaagcacccacaccctagaaggtttccgcagcgacgtcgaggcgctcatggttgcaggcgggcgccgccgttcagttcagggtctgagcctggaggagtgagccaggcagtgagactggctcgggcgggccgggacgcgtcgttgcagcagcggctcccagctcccagccaggattccgcgcgccccttcacgcgccctgctcctgaacttcagctcctgcacagtcctccccaccgcaaggctcaaggcgccgccggcgtggaccgcgcacggcctctaggtctcctcgccaggacagcaacctctcccctggccctcatgggcaccgtcagctccaggcggtcctggtggccgctgccactgctgctgctgctgctgctgctcctgggtcccgcgggcgcccgtgcgcaggaggacgaggacggcgactacgaggagctggtgctagccttgcgttccgaggaggacggcctggccgaagcacccgagcacggaaccacagccaccttccaccgctgcgccaaggatccgtggaggttgcctggcacctacgtggtggtgctgaaggaggagacccacctctcgcagtcagagcgcactgcccgccgcctgcaggcccaggctgcccgccggggatacctcaccaagatcctgcatgtcttccatggccttcttcctggcttcctggtgaagatgagtggcgacctgctggagctggccttgaagttgccccatgtcgactacatcgaggaggactcctctgtctttgcccagagcatcccgtggaacctggagcggattacccctccacggtaccgggcggatgaataccagccccccgacggaggcagcctggtggaggtgtatctcctagacaccagcatacagagtgaccaccgggaaatcgagggcagggtcatggtcaccgacttcgagaatgtgcccgaggaggacgggacccgcttccacagacaggccagcaagtgtgacagtcatggcacccacctggcaggggtggtcagcggccgggatgccggcgtggccaagggtgccagcatgcgcagcctgcgcgtgctcaactgccaagggaagggcacggttagcggcaccctcataggcctggagtttattcggaaaagccagctggtccagcctgtggggccactggtggtgctgctgcccctggcgggtgggtacagccgcgtcctcaacgccgcctgccagcgcctggcgagggctggggtcgtgctggtcaccgctgccggcaacttccgggacgatgcctgcctctactccccagcctcagctcccgaggtcatcacagttggggccaccaatgcccaagaccagccggtgaccctggggactttggggaccaactttggccgctgtgtggacctctttgccccaggggaggacatcattggtgcctccagcgactgcagcacctgctttgtgtcacagagtgggacatcacaggctgctgcccacgtggctggcattgcagccatgatgctgtctgccgagccggagctcaccctggccgagttgaggcagagactgatccacttctctgccaaagatgtcatcaatgaggcctggttccctgaggaccagcgggtactgacccccaacctggtggccgccctgccccccagcacccatggggcaggttggcagctgttttgcaggactgtatggtcagcacactcggggcctacacggatggccacagccgtcgcccgctgcgccccagatgaggagctgctgagctgctccagtttctccaggagtgggaagcggcggggcgagcgcatggaggcccaagggggcaagctggtctgccgggcccacaacgcttttgggggtgagggtgtctacgccattgccaggtgctgcctgctaccccaggccaactgcagcgtccacacagctccaccagctgaggccagcatggggacccgtgtccactgccaccaacagggccacgtcctcacaggctgcagctcccactgggaggtggaggaccttggcacccacaagccgcctgtgctgaggccacgaggtcagcccaaccagtgcgtgggccacagggaggccagcatccacgcttcctgctgccatgccccaggtctggaatgcaaagtcaaggagcatggaatcccggcccctcaggagcaggtgaccgtggcctgcgaggagggctggaccctgactggctgcagtgccctccctgggacctcccacgtcctgggggcctacgccgtagacaacacgtgtgtagtcaggagccgggacgtcagcactacaggcagcaccagcgaaggggccgtgacagccgttgccatctgctgccggagccggcacctggcgcaggcctcccaggagctccagtgacagccccatcccaggatgggtgtctggggagggtcaagggctggggctgagctttaaaatggttccgacttgtccctctctcagccctccatggcctggcacgaggggatggggatgcttccgcctttccggggctgctggcctggcccttgagtggggcagcctccttgcctggaactcactcactctgggtgcctcctccccaggtggaggtgccaggaagctccctccctcactgtggggcatttcaccattcaaacaggtcgagctgtgctcgggtgctgccagctgctcccaatgtgccgatgtccgtgggcagaatgacttttattgagctcttgttccgtgccaggcattcaatcctcaggtctccaccaaggaggcaggattcttcccatggataggggagggggcggtaggggctgcagggacaaacatcgttggggggtgagtgtgaaaggtgctgatggccctcatctccagctaactgtggagaagcccctgggggctccctgattaatggaggcttagctttctggatggcatctagccagaggctggagacaggtgcgcccctggtggtcacaggctgtgccttggtttcctgagccacctttactctgctctatgccaggctgtgctagcaacacccaaaggtggcctgcggggagccatcacctaggactgactcggcagtgtgcagtggtgcatgcactgtctcagccaacccgctccactacccggcagggtacacattcgcacccctacttcacagaggaagaaacctggaaccagagggggcgtgcctgccaagctcacacagcaggaactgagccagaaacgcagattgggctggctctgaagccaagcctcttcttacttcacccggctgggctcctcatttttacgggtaacagtgaggctgggaaggggaacacagaccaggaagctcggtgagtgatggcagaacgatgcctgcaggcatggaactttttccgttatcacccaggcctgattcactggcctggcggagatgcttctaaggcatggtcgggggagagggccaacaactgtccctccttgagcaccagccccacccaagcaagcagacatttatcttttgggtctgtcctctctgttgcctttttacagccaacttttctagacctgttttgcttttgtaacttgaagatatttattctgggttttgtagcatttttattaatatggtgactttttaaaataaaaacaaacaaacgttgtcctaacaaaaaaaaaaaaaaaaaaaaa

SEQ ID NO: 2 - RNA, 48 nt, Artificial Sequence
  Synthetic Construct
uuguagcauuuuuauuaauauggugacuuuuuaaaauaaaaacaaaca

SEQ ID NO: 3 - RNA, 19 nt, Artificial Sequence
  Synthetic Construct
uuguagcauuuuuauuaau

SEQ ID NO: 4 - RNA, 19 nt, Artificial Sequence
  Synthetic Construct
guagcauuuuuauuaauau

SEQ ID NO: 5 - RNA, 19 nt, Artificial Sequence
  Synthetic Construct
gcauuuuuauuaauauggu

SEQ ID NO: 6 - RNA, 19 nt, Artificial Sequence
  Synthetic Construct
uuuuauuaauauggugacu

SEQ ID NO: 7 - RNA, 19 nt, Artificial Sequence
  Synthetic Construct
uauuaauauggugacuuuu

SEQ ID NO: 8 - RNA, 19 nt, Artificial Sequence
  Synthetic Construct
auuaauauggugacuuuuu

SEQ ID NO: 9 - RNA, 19 nt, Artificial Sequence
  Synthetic Construct
uuaauauggugacuuuuua

SEQ ID NO: 10 - RNA, 19 nt, Artificial Sequence
  Synthetic Construct
uaauauggugacuuuuuaa

SEQ ID NO: 11 - RNA, 19 nt, Artificial Sequence
  Synthetic Construct
uauggugacuuuuuaaaau

SEQ ID NO: 12 - RNA, 30 nt, Artificial Sequence
  Synthetic Construct
gagugugaaaggugcugauggcccucaucu

SEQ ID NO: 13 - RNA, 19 nt, Artificial Sequence
  Synthetic Construct
gagugugaaaggugcugau

SEQ ID NO: 14 - RNA, 23 nt, Artificial Sequence
  Synthetic Construct
  misc_feature 1: /note="2'-O-Methylcytidine"
  misc_feature 2: /note="2'-O-Methylcytidine"
  misc_feature 3: /note="2'-O-Methyladenosine"
  misc_feature 4: /note="2'- fluoro-uridine"
  misc_feature 5: /note="2'-O-Methyluridine"
  misc_feature 6: /note="2'-Fluoro-guanosine"
  misc_feature 7: /note="2'-O-Methyluridine"
  misc_feature 8: /note="2'-fluoroadenosine"
  misc_feature 9: /note="2'-O-Methylguanosine"
  misc_feature 10: /note="2'-Fluoro-cytidine"
  misc_feature 11: /note="2'-O-Methyladenosine"
  misc_feature 12: /note="2'- fluoro-uridine"
  misc_feature 13: /note="2'-O-Methyluridine"
  misc_feature 14: /note="2'- fluoro-uridine"
  misc_feature 15: /note="2'-O-Methyluridine"
  misc_feature 16: /note="2'- fluoro-uridine"
  misc_feature 17: /note="2'-O-Methyladenosine"
  misc_feature 18: /note="2'- fluoro-uridine"
  misc_feature 19: /note="2'-O-Methyluridine"
  misc_feature 20: /note="2'-fluoroadenosine"
  misc_feature 21: /note="2'-O-Methyladenosine"
  misc_feature 22: /note="2'- fluoro-uridine"
  misc_feature 23: /note="Inverted DNA thymine"
ccauuguagcauuuuuauuaaut

SEQ ID NO: 15 - RNA, 21 nt, Artificial Sequence
  Synthetic Construct
  misc_feature 1: /note="2'-fluoroadenosine"
  misc_feature 2: /note="2'- fluoro-uridine"
  misc_feature 3: /note="2'-O-Methyluridine"
  misc_feature 4: /note="2'-fluoroadenosine"
  misc_feature 5: /note="2'-O-Methyladenosine"
  misc_feature 6: /note="2'- fluoro-uridine"
  misc_feature 7: /note="2'-O-Methyladenosine"
  misc_feature 8: /note="2'-fluoroadenosine"
  misc_feature 10: /note="2'-fluoroadenosine"
  misc_feature 11: /note="2'-O-Methyladenosine"
  misc_feature 12: /note="2'- fluoro-uridine"
  misc_feature 13: /note="2'-O-Methylguanosine"
  misc_feature 14: /note="2'-Fluoro-cytidine"
  misc_feature 15: /note="2'-O-Methyluridine"
  misc_feature 16: /note="2'-fluoroadenosine"
  misc_feature 17: /note="2'-O-Methylcytidine"
  misc_feature 18: /note="2'-fluoroadenosine"
  misc_feature 19: /note="2'-O-Methyladenosine"
  misc_feature 20: /note="DNA thymine"
  misc_feature 21: /note="DNA thymine"
auuaauaaaaaugcuacaatt

SEQ ID NO: 16 - RNA, 23 nt, Artificial Sequence
  Synthetic Construct
  misc_feature 1: /note="2'-O-Methylcytidine"
  misc_feature 2: /note="2'-O-Methylcytidine"
  misc_feature 3: /note="2'-O-Methyladenosine"
  misc_feature 4: /note="2'- fluoro-uridine"
  misc_feature 5: /note="2'-O-Methylguanosine"
  misc_feature 6: /note="2'- fluoro-uridine"
  misc_feature 7: /note="2'-O-Methyladenosine"
  misc_feature 8: /note="2'-Fluoro-guanosine"
  misc_feature 9: /note="2'-O-Methylcytidine"
  misc_feature 10: /note="2'-fluoroadenosine"
  misc_feature 11: /note="2'-O-Methyluridine"
  misc_feature 12: /note="2'- fluoro-uridine"
  misc_feature 13: /note="2'-O-Methyluridine"
  misc_feature 14: /note="2'- fluoro-uridine"
  misc_feature 15: /note="2'-O-Methyluridine"
  misc_feature 16: /note="2'-fluoroadenosine"
  misc_feature 17: /note="2'-O-Methyluridine"
  misc_feature 18: /note="2'- fluoro-uridine"
  misc_feature 19: /note="2'-O-Methyladenosine"
  misc_feature 20: /note="2'-fluoroadenosine"
  misc_feature 21: /note="2'-O-Methyluridine"
  misc_feature 22: /note="2'-fluoroadenosine"
  misc_feature 23: /note="Inverted DNA thymine"
ccauguagcauuuuuauuaauat

SEQ ID NO: 17 - RNA, 21 nt, Artificial Sequence
  Synthetic Construct
  misc_feature 1: /note="2'- fluoro-uridine"
  misc_feature 2: /note="2'-fluoroadenosine"
  misc_feature 3: /note="2'-O-Methyluridine"
  misc_feature 4: /note="2'- fluoro-uridine"
  misc_feature 5: /note="2'-O-Methyladenosine"
  misc_feature 6: /note="2'-fluoroadenosine"
  misc_feature 7: /note="2'-O-Methyluridine"
  misc_feature 8: /note="2'-fluoroadenosine"
  misc_feature 9: /note="2'-O-Methyladenosine"
  misc_feature 10: /note="2'-fluoroadenosine"
  misc_feature 11: /note="2'-O-Methyladenosine"
  misc_feature 12: /note="2'-fluoroadenosine"
  misc_feature 13: /note="2'-O-Methyluridine"
  misc_feature 14: /note="2'-Fluoro-guanosine"
  misc_feature 15: /note="2'-O-Methylcytidine"
  misc_feature 16: /note="2'- fluoro-uridine"
  misc_feature 17: /note="2'-O-Methyladenosine"
  misc_feature 18: /note="2'-Fluoro-cytidine"
  misc_feature 19: /note="2'-O-Methyladenosine"
  misc_feature 20: /note="DNA thymine"
  misc_feature 21: /note="DNA thymine"
uauuaauaaaaaugcuacatt

SEQ ID NO: 18 - RNA, 23 nt, Artificial Sequence
  Synthetic Construct
  misc_feature 1: /note="2'-O-Methylcytidine"
  misc_feature 2: /note="2'-O-Methylcytidine"
  misc_feature 3: /note="2'-O-Methyladenosine"
  misc_feature 4: /note="2'-Fluoro-guanosine"
  misc_feature 5: /note="2'-O-Methyluridine"
  misc_feature 6: /note="2'-fluoroadenosine"
  misc_feature 7: /note="2'-O-Methylguanosine"
  misc_feature 8: /note="2'-Fluoro-cytidine"
  misc_feature 9: /note="2'-O-Methyladenosine"
  misc_feature 10: /note="2'- fluoro-uridine"
  misc_feature 11: /note="2'-O-Methyluridine"
  misc_feature 12: /note="2'- fluoro-uridine"
  misc_feature 13: /note="2'-O-Methyluridine"
  misc_feature 14: /note="2'- fluoro-uridine"
  misc_feature 15: /note="2'-O-Methyladenosine"
  misc_feature 16: /note="2'- fluoro-uridine"
  misc_feature 17: /note="2'-O-Methyluridine"
  misc_feature 18: /note="2'-fluoroadenosine"
  misc_feature 19: /note="2'-O-Methyladenosine"
  misc_feature 20: /note="2'- fluoro-uridine"
  misc_feature 21: /note="2'-O-Methyladenosine"
  misc_feature 22: /note="2'- fluoro-uridine"
  misc_feature 23: /note="Inverted DNA thymine"
ccaguagcauuuuuauuaauaut

SEQ ID NO: 19 - RNA, 21 nt, Artificial Sequence
  Synthetic Construct
  misc_feature 1: /note="2'-fluoroadenosine"
  misc_feature 2: /note="2'- fluoro-uridine"
  misc_feature 3: /note="2'-O-Methyladenosine"
  misc_feature 4: /note="2'- fluoro-uridine"
  misc_feature 5: /note="2'-O-Methyluridine"
  misc_feature 6: /note="2'-fluoroadenosine"
  misc_feature 7: /note="2'-O-Methyladenosine"
  misc_feature 8: /note="2'- fluoro-uridine"
  misc_feature 9: /note="2'-O-Methyladenosine"
  misc_feature 10: /note="2'-fluoroadenosine"
  misc_feature 11: /note="2'-O-Methyladenosine"
  misc_feature 12: /note="2'-fluoroadenosine"
  misc_feature 13: /note="2'-O-Methyladenosine"
  misc_feature 14: /note="2'- fluoro-uridine"
  misc_feature 15: /note="2'-O-Methylguanosine"
  misc_feature 16: /note="2'-Fluoro-cytidine"
  misc_feature 17: /note="2'-O-Methyluridine"
  misc_feature 18: /note="2'-fluoroadenosine"
  misc_feature 19: /note="2'-O-Methylcytidine"
  misc_feature 20: /note="DNA thymine"
  misc_feature 21: /note="DNA thymine"
auauuaauaaaaaugcuactt

SEQ ID NO: 20 - RNA, 23 nt, Artificial Sequence
  Synthetic Construct
  misc_feature 1: /note="2'-O-Methylcytidine"
  misc_feature 2: /note="2'-O-Methylcytidine"
  misc_feature 3: /note="2'-O-Methyladenosine"
  misc_feature 4: /note="2'- fluoro-uridine"
  misc_feature 5: /note="2'-O-Methyladenosine"
  misc_feature 6: /note="2'-Fluoro-guanosine"
  misc_feature 7: /note="2'-O-Methylcytidine"
  misc_feature 8: /note="2'-fluoroadenosine"
  misc_feature 9: /note="2'-O-Methyluridine"
  misc_feature 10: /note="2'- fluoro-uridine"
  misc_feature 11: /note="2'-O-Methyluridine"
  misc_feature 12: /note="2'- fluoro-uridine"
  misc_feature 13: /note="2'-O-Methyluridine"
  misc_feature 14: /note="2'-fluoroadenosine"
  misc_feature 15: /note="2'-O-Methyluridine"
  misc_feature 16: /note="2'- fluoro-uridine"
  misc_feature 17: /note="2'-O-Methyladenosine"
  misc_feature 18: /note="2'-fluoroadenosine"
  misc_feature 19: /note="2'-O-Methyluridine"
  misc_feature 20: /note="2'-fluoroadenosine"
  misc_feature 21: /note="2'-O-Methyluridine"
  misc_feature 22: /note="2'-Fluoro-guanosine"
  misc_feature 23: /note="Inverted DNA thymine"
ccauagcauuuuuauuaauaugt

SEQ ID NO: 21 - RNA, 21 nt, Artificial Sequence
  Synthetic Construct
  misc_feature 1: /note="2'-Fluoro-cytidine"
  misc_feature 2: /note="2'-fluoroadenosine"
  misc_feature 3: /note="2'-O-Methyluridine"
  misc_feature 4: /note="2'-fluoroadenosine"
  misc_feature 5: /note="2'-O-Methyluridine"
  misc_feature 6: /note="2'- fluoro-uridine"
  misc_feature 7: /note="2'-O-Methyladenosine"
  misc_feature 8: /note="2'-fluoroadenosine"
  misc_feature 9: /note="2'-O-Methyluridine"
  misc_feature 10: /note="2'-fluoroadenosine"
  misc_feature 11: /note="2'-O-Methyladenosine"
  misc_feature 12: /note="2'-fluoroadenosine"
  misc_feature 13: /note="2'-O-Methyladenosine"
  misc_feature 14: /note="2'-fluoroadenosine"
  misc_feature 15: /note="2'-O-Methyluridine"
  misc_feature 16: /note="2'-Fluoro-guanosine"
  misc_feature 17: /note="2'-O-Methylcytidine"
  misc_feature 18: /note="2'- fluoro-uridine"
  misc_feature 19: /note="2'-O-Methyladenosine"
  misc_feature 20: /note="DNA thymine"
  misc_feature 21: /note="DNA thymine"
cauauuaauaaaaaugcuatt

SEQ ID NO: 22 - RNA, 23 nt, Artificial Sequence
  Synthetic Construct
  misc_feature 1: /note="2'-O-Methylcytidine"
  misc_feature 2: /note="2'-O-Methylcytidine"
  misc_feature 3: /note="2'-O-Methyladenosine"
  misc_feature 4: /note="2'-fluoroadenosine"
  misc_feature 5: /note="2'-O-Methylguanosine"
  misc_feature 6: /note="2'-Fluoro-cytidine"
  misc_feature 7: /note="2'-O-Methyladenosine"
  misc_feature 8: /note="2'- fluoro-uridine"
  misc_feature 9: /note="2'-O-Methyluridine"
  misc_feature 10: /note="2'- fluoro-uridine"
  misc_feature 11: /note="2'-O-Methyluridine"
  misc_feature 12: /note="2'- fluoro-uridine"
  misc_feature 13: /note="2'-O-Methyladenosine"
  misc_feature 14: /note="2'- fluoro-uridine"
  misc_feature 15: /note="2'-O-Methyluridine"
  misc_feature 16: /note="2'-fluoroadenosine"
  misc_feature 17: /note="2'-O-Methyladenosine"
  misc_feature 18: /note="2'- fluoro-uridine"
  misc_feature 19: /note="2'-O-Methyladenosine"
  misc_feature 20: /note="2'- fluoro-uridine"
  misc_feature 21: /note="2'-O-Methylguanosine"
  misc_feature 22: /note="2'-Fluoro-guanosine"
  misc_feature 23: /note="Inverted DNA thymine"
ccaagcauuuuuauuaauauggt

SEQ ID NO: 23 - RNA, 21 nt, Artificial Sequence
  Synthetic Construct
  misc_feature 1: /note="2'-Fluoro-cytidine"
  misc_feature 2: /note="2'-Fluoro-cytidine"
  misc_feature 3: /note="2'-O-Methyladenosine"
  misc_feature 4: /note="2'- fluoro-uridine"
  misc_feature 5: /note="2'-O-Methyladenosine"
  misc_feature 6: /note="2'- fluoro-uridine"
  misc_feature 7: /note="2'-O-Methyluridine"
  misc_feature 8: /note="2'-fluoroadenosine"
  misc_feature 9: /note="2'-O-Methyladenosine"
  misc_feature 10: /note="2'- fluoro-uridine"
  misc_feature 11: /note="2'-O-Methyladenosine"
  misc_feature 12: /note="2'-fluoroadenosine"
  misc_feature 13: /note="2'-O-Methyladenosine"
  misc_feature 14: /note="2'-fluoroadenosine"
  misc_feature 15: /note="2'-O-Methyladenosine"
  misc_feature 16: /note="2'- fluoro-uridine"
  misc_feature 17: /note="2'-O-Methylguanosine"
  misc_feature 18: /note="2'-Fluoro-cytidine"
  misc_feature 19: /note="2'-O-Methyluridine"
  misc_feature 20: /note="DNA thymine"
  misc_feature 21: /note="DNA thymine"
ccauauuaauaaaaaugcutt

SEQ ID NO: 24 - RNA, 23 nt, Artificial Sequence
  Synthetic Construct
  misc_feature 1: /note="2'-O-Methylcytidine"
  misc_feature 2: /note="2'-O-Methylcytidine"
  misc_feature 3: /note="2'-O-Methyladenosine"
  misc_feature 4: /note="2'-Fluoro-guanosine"
  misc_feature 5: /note="2'-O-Methylcytidine"
  misc_feature 6: /note="2'-fluoroadenosine"
  misc_feature 7: /note="2'-O-Methyluridine"
  misc_feature 8: /note="2'- fluoro-uridine"
  misc_feature 9: /note="2'-O-Methyluridine"
  misc_feature 10: /note="2'- fluoro-uridine"
  misc_feature 11: /note="2'-O-Methyluridine"
  misc_feature 12: /note="2'-fluoroadenosine"
  misc_feature 13: /note="2'-O-Methyluridine"
  misc_feature 14: /note="2'- fluoro-uridine"
  misc_feature 15: /note="2'-O-Methyladenosine"
  misc_feature 16: /note="2'-fluoroadenosine"
  misc_feature 17: /note="2'-O-Methyluridine"
  misc_feature 18: /note="2'-fluoroadenosine"
  misc_feature 19: /note="2'-O-Methyluridine"
  misc_feature 20: /note="2'-Fluoro-guanosine"
  misc_feature 21: /note="2'-O-Methylguanosine"
  misc_feature 22: /note="2'- fluoro-uridine"
  misc_feature 23: /note="Inverted DNA thymine"
ccagcauuuuuauuaauauggut

SEQ ID NO: 25 - RNA, 21 nt, Artificial Sequence
  Synthetic Construct
  misc_feature 1: /note="2'-fluoroadenosine"
  misc_feature 2: /note="2'-Fluoro-cytidine"
  misc_feature 3: /note="2'-O-Methylcytidine"
  misc_feature 4: /note="2'-fluoroadenosine"
  misc_feature 5: /note="2'-O-Methyluridine"
  misc_feature 6: /note="2'-fluoroadenosine"
  misc_feature 7: /note="2'-O-Methyluridine"
  misc_feature 8: /note="2'- fluoro-uridine"
  misc_feature 9: /note="2'-O-Methyladenosine"
  misc_feature 10: /note="2'-fluoroadenosine"
  misc_feature 11: /note="2'-O-Methyluridine"
  misc_feature 12: /note="2'-fluoroadenosine"
  misc_feature 13: /note="2'-O-Methyladenosine"
  misc_feature 14: /note="2'-fluoroadenosine"
  misc_feature 15: /note="2'-O-Methyladenosine"
  misc_feature 16: /note="2'-fluoroadenosine"
  misc_feature 17: /note="2'-O-Methyluridine"
  misc_feature 18: /note="2'-Fluoro-guanosine"
  misc_feature 19: /note="2'-O-Methylcytidine"
  misc_feature 20: /note="DNA thymine"
  misc_feature 21: /note="DNA thymine"
accauauuaauaaaaaugctt

SEQ ID NO: 26 - RNA, 23 nt, Artificial Sequence
  Synthetic Construct
  misc_feature 1: /note="2'-O-Methylcytidine"
  misc_feature 2: /note="2'-O-Methylcytidine"
  misc_feature 3: /note="2'-O-Methyladenosine"
  misc_feature 4: /note="2'- fluoro-uridine"
  misc_feature 5: /note="2'-O-Methyluridine"
  misc_feature 6: /note="2'- fluoro-uridine"
  misc_feature 7: /note="2'-O-Methyluridine"
  misc_feature 8: /note="2'- fluoro-uridine"
  misc_feature 9: /note="2'-O-Methyladenosine"
  misc_feature 10: /note="2'- fluoro-uridine"
  misc_feature 11: /note="2'-O-Methyluridine"
  misc_feature 12: /note="2'-fluoroadenosine"
  misc_feature 13: /note="2'-O-Methyladenosine"
  misc_feature 14: /note="2'- fluoro-uridine"
  misc_feature 15: /note="2'-O-Methyladenosine"
  misc_feature 16: /note="2'- fluoro-uridine"
  misc_feature 17: /note="2'-O-Methylguanosine"
  misc_feature 18: /note="2'-Fluoro-guanosine"
  misc_feature 19: /note="2'-O-Methyluridine"
  misc_feature 20: /note="2'-Fluoro-guanosine"
  misc_feature 21: /note="2'-O-Methyladenosine"
  misc_feature 22: /note="2'-Fluoro-cytidine"
  misc_feature 23: /note="Inverted DNA thymine"
ccauuuuuauuaauauggugact

SEQ ID NO: 27 - RNA, 21 nt, Artificial Sequence
  Synthetic Construct
  misc_feature 1: /note="2'-Fluoro-guanosine"
  misc_feature 2: /note="2'- fluoro-uridine"
  misc_feature 3: /note="2'-O-Methylcytidine"
  misc_feature 4: /note="2'-fluoroadenosine"
  misc_feature 5: /note="2'-O-Methylcytidine"
  misc_feature 6: /note="2'-Fluoro-cytidine"
  misc_feature 7: /note="2'-O-Methyladenosine"
  misc_feature 8: /note="2'- fluoro-uridine"
  misc_feature 9: /note="2'-O-Methyladenosine"
  misc_feature 10: /note="2'- fluoro-uridine"
  misc_feature 11: /note="2'-O-Methyluridine"
  misc_feature 12: /note="2'-fluoroadenosine"
  misc_feature 13: /note="2'-O-Methyladenosine"
  misc_feature 14: /note="2'- fluoro-uridine"
  misc_feature 15: /note="2'-O-Methyladenosine"
  misc_feature 16: /note="2'-fluoroadenosine"
  misc_feature 17: /note="2'-O-Methyladenosine"
  misc_feature 18: /note="2'-fluoroadenosine"
  misc_feature 19: /note="2'-O-Methyladenosine"
  misc_feature 20: /note="DNA thymine"
  misc_feature 21: /note="DNA thymine"
gucaccauauuaauaaaaatt

SEQ ID NO: 28 - RNA, 23 nt, Artificial Sequence
  Synthetic Construct
  misc_feature 1: /note="2'-O-Methylcytidine"
  misc_feature 2: /note="2'-O-Methylcytidine"
  misc_feature 3: /note="2'-O-Methyladenosine"
  misc_feature 4: /note="2'- fluoro-uridine"
  misc_feature 5: /note="2'-O-Methyluridine"
  misc_feature 6: /note="2'- fluoro-uridine"
  misc_feature 7: /note="2'-O-Methyluridine"
  misc_feature 8: /note="2'-fluoroadenosine"
  misc_feature 9: /note="2'-O-Methyluridine"
  misc_feature 10: /note="2'- fluoro-uridine"
  misc_feature 11: /note="2'-O-Methyladenosine"
  misc_feature 12: /note="2'-fluoroadenosine"
  misc_feature 13: /note="2'-O-Methyluridine"
  misc_feature 14: /note="2'-fluoroadenosine"
  misc_feature 15: /note="2'-O-Methyluridine"
  misc_feature 16: /note="2'-Fluoro-guanosine"
  misc_feature 17: /note="2'-O-Methylguanosine"
  misc_feature 18: /note="2'- fluoro-uridine"
  misc_feature 19: /note="2'-O-Methylguanosine"
  misc_feature 20: /note="2'-fluoroadenosine"
  misc_feature 21: /note="2'-O-Methylcytidine"
  misc_feature 22: /note="2'- fluoro-uridine"
  misc_feature 23: /note="Inverted DNA thymine"
ccauuuuauuaauauggugacut

SEQ ID NO: 29 - RNA, 21 nt, Artificial Sequence
  Synthetic Construct
  misc_feature 1: /note="2'-fluoroadenosine"
  misc_feature 2: /note="2'-Fluoro-guanosine"
  misc_feature 3: /note="2'-O-Methyluridine"
  misc_feature 4: /note="2'-Fluoro-cytidine"
  misc_feature 5: /note="2'-O-Methyladenosine"
  misc_feature 6: /note="2'-Fluoro-cytidine"
  misc_feature 7: /note="2'-O-Methylcytidine"
  misc_feature 8: /note="2'-fluoroadenosine"
  misc_feature 9: /note="2'-O-Methyluridine"
  misc_feature 10: /note="2'-fluoroadenosine"
  misc_feature 11: /note="2'-O-Methyluridine"
  misc_feature 12: /note="2'- fluoro-uridine"
  misc_feature 13: /note="2'-O-Methyladenosine"
  misc_feature 14: /note="2'-fluoroadenosine"
  misc_feature 15: /note="2'-O-Methyluridine"
  misc_feature 16: /note="2'-fluoroadenosine"
  misc_feature 17: /note="2'-O-Methyladenosine"
  misc_feature 18: /note="2'-fluoroadenosine"
  misc_feature 19: /note="2'-O-Methyladenosine"
  misc_feature 20: /note="DNA thymine"
  misc_feature 21: /note="DNA thymine"
agucaccauauuaauaaaatt

SEQ ID NO: 30 - RNA, 23 nt, Artificial Sequence
  Synthetic Construct
  misc_feature 1: /note="2'-O-Methylcytidine"
  misc_feature 2: /note="2'-O-Methylcytidine"
  misc_feature 3: /note="2'-O-Methyladenosine"
  misc_feature 4: /note="2'- fluoro-uridine"
  misc_feature 5: /note="2'-O-Methyluridine"
  misc_feature 6: /note="2'- fluoro-uridine"
  misc_feature 7: /note="2'-O-Methyladenosine"
  misc_feature 8: /note="2'- fluoro-uridine"
  misc_feature 9: /note="2'-O-Methyluridine"
  misc_feature 10: /note="2'-fluoroadenosine"
  misc_feature 11: /note="2'-O-Methyladenosine"
  misc_feature 12: /note="2'- fluoro-uridine"
  misc_feature 13: /note="2'-O-Methyladenosine"
  misc_feature 14: /note="2'- fluoro-uridine"
  misc_feature 15: /note="2'-O-Methylguanosine"
  misc_feature 16: /note="2'-Fluoro-guanosine"
  misc_feature 17: /note="2'-O-Methyluridine"
  misc_feature 18: /note="2'-Fluoro-guanosine"
  misc_feature 19: /note="2'-O-Methyladenosine"
  misc_feature 20: /note="2'-Fluoro-cytidine"
  misc_feature 21: /note="2'-O-Methyluridine"
  misc_feature 22: /note="2'- fluoro-uridine"
  misc_feature 23: /note="Inverted DNA thymine"
ccauuuauuaauauggugacuut

SEQ ID NO: 31 - RNA, 21 nt, Artificial Sequence
  Synthetic Construct
  misc_feature 1: /note="2'-fluoroadenosine"
  misc_feature 2: /note="2'-fluoroadenosine"
  misc_feature 3: /note="2'-O-Methylguanosine"
  misc_feature 4: /note="2'- fluoro-uridine"
  misc_feature 5: /note="2'-O-Methylcytidine"
  misc_feature 6: /note="2'-fluoroadenosine"
  misc_feature 7: /note="2'-O-Methylcytidine"
  misc_feature 8: /note="2'-Fluoro-cytidine"
  misc_feature 9: /note="2'-O-Methyladenosine"
  misc_feature 10: /note="2'- fluoro-uridine"
  misc_feature 11: /note="2'-O-Methyladenosine"
  misc_feature 12: /note="2'- fluoro-uridine"
  misc_feature 13: /note="2'-O-Methyluridine"
  misc_feature 14: /note="2'-fluoroadenosine"
  misc_feature 15: /note="2'-O-Methyladenosine"
  misc_feature 16: /note="2'- fluoro-uridine"
  misc_feature 17: /note="2'-O-Methyladenosine"
  misc_feature 18: /note="2'-fluoroadenosine"
  misc_feature 19: /note="2'-O-Methyladenosine"
  misc_feature 20: /note="DNA thymine"
  misc_feature 21: /note="DNA thymine"
aagucaccauauuaauaaatt

SEQ ID NO: 32 - RNA, 23 nt, Artificial Sequence
  Synthetic Construct
  misc_feature 1: /note="2'-O-Methylcytidine"
  misc_feature 2: /note="2'-O-Methylcytidine"
  misc_feature 3: /note="2'-O-Methyladenosine"
  misc_feature 4: /note="2'- fluoro-uridine"
  misc_feature 5: /note="2'-O-Methyladenosine"
  misc_feature 6: /note="2'- fluoro-uridine"
  misc_feature 7: /note="2'-O-Methyluridine"
  misc_feature 8: /note="2'-fluoroadenosine"
  misc_feature 9: /note="2'-O-Methyladenosine"
  misc_feature 10: /note="2'- fluoro-uridine"
  misc_feature 11: /note="2'-O-Methyladenosine"
  misc_feature 12: /note="2'- fluoro-uridine"
  misc_feature 13: /note="2'-O-Methylguanosine"
  misc_feature 14: /note="2'-Fluoro-guanosine"
  misc_feature 15: /note="2'-O-Methyluridine"
  misc_feature 16: /note="2'-Fluoro-guanosine"
  misc_feature 17: /note="2'-O-Methyladenosine"
  misc_feature 18: /note="2'-Fluoro-cytidine"
  misc_feature 19: /note="2'-O-Methyluridine"
  misc_feature 20: /note="2'- fluoro-uridine"
  misc_feature 21: /note="2'-O-Methyluridine"
  misc_feature 22: /note="2'- fluoro-uridine"
  misc_feature 23: /note="Inverted DNA thymine"
ccauauuaauauggugacuuuut

SEQ ID NO: 33 - RNA, 21 nt, Artificial Sequence
  Synthetic Construct
  misc_feature 1: /note="2'-fluoroadenosine"
  misc_feature 2: /note="2'-fluoroadenosine"
  misc_feature 3: /note="2'-O-Methyladenosine"
  misc_feature 4: /note="2'-fluoroadenosine"
  misc_feature 5: /note="2'-O-Methylguanosine"
  misc_feature 6: /note="2'- fluoro-uridine"
  misc_feature 7: /note="2'-O-Methylcytidine"
  misc_feature 8: /note="2'-fluoroadenosine"
  misc_feature 9: /note="2'-O-Methylcytidine"
  misc_feature 10: /note="2'-Fluoro-cytidine"
  misc_feature 11: /note="2'-O-Methyladenosine"
  misc_feature 12: /note="2'- fluoro-uridine"
  misc_feature 13: /note="2'-O-Methyladenosine"
  misc_feature 14: /note="2'- fluoro-uridine"
  misc_feature 15: /note="2'-O-Methyluridine"
  misc_feature 16: /note="2'-fluoroadenosine"
  misc_feature 17: /note="2'-O-Methyladenosine"
  misc_feature 18: /note="2'- fluoro-uridine"
  misc_feature 19: /note="2'-O-Methyladenosine"
  misc_feature 20: /note="DNA thymine"
  misc_feature 21: /note="DNA thymine"
aaaagucaccauauuaauatt

SEQ ID NO: 34 - RNA, 23 nt, Artificial Sequence
  Synthetic Construct
  misc_feature 1: /note="2'-O-Methylcytidine"
  misc_feature 2: /note="2'-O-Methylcytidine"
  misc_feature 3: /note="2'-O-Methyladenosine"
  misc_feature 4: /note="2'-fluoroadenosine"
  misc_feature 5: /note="2'-O-Methyluridine"
  misc_feature 6: /note="2'-Fluoro-guanosine"
  misc_feature 7: /note="2'-O-Methyladenosine"
  misc_feature 8: /note="2'-fluoroadenosine"
  misc_feature 9: /note="2'-O-Methyluridine"
  misc_feature 10: /note="2'-fluoroadenosine"
  misc_feature 11: /note="2'-O-Methyluridine"
  misc_feature 13: /note="2'-O-Methylguanosine"
  misc_feature 14: /note="2'-Fluoro-guanosine"
  misc_feature 15: /note="2'-O-Methylguanosine"
  misc_feature 16: /note="2'-fluoroadenosine"
  misc_feature 17: /note="2'-O-Methylcytidine"
  misc_feature 18: /note="2'-Fluoro-guanosine"
  misc_feature 19: /note="2'-O-Methyluridine"
  misc_feature 20: /note="2'-Fluoro-guanosine"
  misc_feature 21: /note="2'-O-Methyluridine"
  misc_feature 22: /note="2'-Fluoro-guanosine"
  misc_feature 23: /note="Inverted DNA thymine"
ccaauuaauauggugacuuuuut

SEQ ID NO: 35 - RNA, 21 nt, Artificial Sequence
  Synthetic Construct
  misc_feature 1: /note="2'-fluoroadenosine"
  misc_feature 2: /note="2'-fluoroadenosine"
  misc_feature 3: /note="2'-O-Methyladenosine"
  misc_feature 4: /note="2'-fluoroadenosine"
  misc_feature 5: /note="2'-O-Methyladenosine"
  misc_feature 6: /note="2'-Fluoro-guanosine"
  misc_feature 7: /note="2'-O-Methyluridine"
  misc_feature 8: /note="2'-Fluoro-cytidine"
  misc_feature 9: /note="2'-O-Methyladenosine"
  misc_feature 10: /note="2'-Fluoro-cytidine"
  misc_feature 11: /note="2'-O-Methylcytidine"
  misc_feature 12: /note="2'-fluoroadenosine"
  misc_feature 13: /note="2'-O-Methyluridine"
  misc_feature 14: /note="2'-fluoroadenosine"
  misc_feature 15: /note="2'-O-Methyluridine"
  misc_feature 16: /note="2'- fluoro-uridine"
  misc_feature 17: /note="2'-O-Methyladenosine"
  misc_feature 18: /note="2'-fluoroadenosine"
  misc_feature 19: /note="2'-O-Methyluridine"
  misc_feature 20: /note="DNA thymine"
  misc_feature 21: /note="DNA thymine"
aaaaagucaccauauuaautt

SEQ ID NO: 36 - RNA, 23 nt, Artificial Sequence
  Synthetic Construct
  misc_feature 1: /note="2'-O-Methylcytidine"
  misc_feature 2: /note="2'-O-Methylcytidine"
  misc_feature 3: /note="2'-O-Methyladenosine"
  misc_feature 4: /note="2'- fluoro-uridine"
  misc_feature 6: /note="2'-fluoroadenosine"
  misc_feature 7: /note="2'-O-Methyladenosine"
  misc_feature 8: /note="2'- fluoro-uridine"
  misc_feature 9: /note="2'-O-Methyladenosine"
  misc_feature 10: /note="2'- fluoro-uridine"
  misc_feature 11: /note="2'-O-Methylguanosine"
  misc_feature 12: /note="2'-Fluoro-guanosine"
  misc_feature 13: /note="2'-O-Methyluridine"
  misc_feature 14: /note="2'-Fluoro-guanosine"
  misc_feature 15: /note="2'-O-Methyladenosine"
  misc_feature 16: /note="2'-Fluoro-cytidine"
  misc_feature 17: /note="2'-O-Methyluridine"
  misc_feature 18: /note="2'- fluoro-uridine"
  misc_feature 19: /note="2'-O-Methyluridine"
  misc_feature 20: /note="2'- fluoro-uridine"
  misc_feature 21: /note="2'-O-Methyluridine"
  misc_feature 22: /note="2'-fluoroadenosine"
  misc_feature 23: /note="Inverted DNA thymine"
ccauuaauauggugacuuuuuat

SEQ ID NO: 37 - RNA, 21 nt, Artificial Sequence
  Synthetic Construct
  misc_feature 1: /note="2'- fluoro-uridine"
  misc_feature 2: /note="2'-fluoroadenosine"
  misc_feature 3: /note="2'-O-Methyladenosine"
  misc_feature 4: /note="2'-fluoroadenosine"
  misc_feature 5: /note="2'-O-Methyladenosine"
  misc_feature 6: /note="2'-fluoroadenosine"
  misc_feature 7: /note="2'-O-Methylguanosine"
  misc_feature 8: /note="2'- fluoro-uridine"
  misc_feature 9: /note="2'-O-Methylcytidine"
  misc_feature 10: /note="2'-fluoroadenosine"
  misc_feature 11: /note="2'-O-Methylcytidine"
  misc_feature 12: /note="2'-Fluoro-cytidine"
  misc_feature 13: /note="2'-O-Methyladenosine"
  misc_feature 14: /note="2'- fluoro-uridine"
  misc_feature 15: /note="2'-O-Methyladenosine"
  misc_feature 16: /note="2'- fluoro-uridine"
  misc_feature 17: /note="2'-O-Methyluridine"
  misc_feature 18: /note="2'-fluoroadenosine"
  misc_feature 19: /note="2'-O-Methyladenosine"
  misc_feature 20: /note="DNA thymine"
  misc_feature 21: /note="DNA thymine"
uaaaaagucaccauauuaatt

SEQ ID NO: 38 - RNA, 23 nt, Artificial Sequence
  Synthetic Construct
  misc_feature 1: /note="2'-O-Methylcytidine"
  misc_feature 2: /note="2'-O-Methylcytidine"
  misc_feature 3: /note="2'-O-Methyladenosine"
  misc_feature 6: /note="2'-fluoroadenosine"
  misc_feature 7: /note="2'-O-Methyluridine"
  misc_feature 8: /note="2'-fluoroadenosine"
  misc_feature 9: /note="2'-O-Methyluridine"
  misc_feature 10: /note="2'-Fluoro-guanosine"
  misc_feature 11: /note="2'-O-Methylguanosine"
  misc_feature 12: /note="2'- fluoro-uridine"
  misc_feature 13: /note="2'-O-Methylguanosine"
  misc_feature 15: /note="2'-O-Methylcytidine"
  misc_feature 16: /note="2'- fluoro-uridine"
  misc_feature 17: /note="2'-O-Methyluridine"
  misc_feature 18: /note="2'- fluoro-uridine"
  misc_feature 19: /note="2'-O-Methyluridine"
  misc_feature 20: /note="2'- fluoro-uridine"
  misc_feature 23: /note="Inverted DNA thymine"
ccauaauauggugacuuuuuaat

SEQ ID NO: 39 - RNA, 21 nt, Artificial Sequence
  Synthetic Construct
  misc_feature 1: /note="2'- fluoro-uridine"
  misc_feature 2: /note="2'- fluoro-uridine"
  misc_feature 3: /note="2'-O-Methyladenosine"
  misc_feature 4: /note="2'-fluoroadenosine"
  misc_feature 5: /note="2'-O-Methyladenosine"
  misc_feature 6: /note="2'-fluoroadenosine"
  misc_feature 7: /note="2'-O-Methyladenosine"
  misc_feature 8: /note="2'-Fluoro-guanosine"
  misc_feature 9: /note="2'-O-Methyluridine"
  misc_feature 10: /note="2'-Fluoro-cytidine"
  misc_feature 11: /note="2'-O-Methyladenosine"
  misc_feature 12: /note="2'-Fluoro-cytidine"
  misc_feature 13: /note="2'-O-Methylcytidine"
  misc_feature 14: /note="2'-fluoroadenosine"
  misc_feature 15: /note="2'-O-Methyluridine"
  misc_feature 16: /note="2'-fluoroadenosine"
  misc_feature 17: /note="2'-O-Methyluridine"
  misc_feature 18: /note="2'- fluoro-uridine"
  misc_feature 19: /note="2'-O-Methyladenosine"
  misc_feature 20: /note="DNA thymine"
  misc_feature 21: /note="DNA thymine"
uuaaaaagucaccauauuatt

SEQ ID NO: 40 - RNA, 23 nt, Artificial Sequence
  Synthetic Construct
  misc_feature 1: /note="2'-O-Methylcytidine"
  misc_feature 2: /note="2'-O-Methylcytidine"
  misc_feature 3: /note="2'-O-Methyladenosine"
  misc_feature 5: /note="2'-O-Methyladenosine"
  misc_feature 7: /note="2'-O-Methylguanosine"
  misc_feature 8: /note="2'-Fluoro-guanosine"
  misc_feature 9: /note="2'-O-Methyluridine"
  misc_feature 10: /note="2'-Fluoro-guanosine"
  misc_feature 11: /note="2'-O-Methyladenosine"
  misc_feature 12: /note="2'-Fluoro-cytidine"
  misc_feature 13: /note="2'-O-Methyluridine"
  misc_feature 14: /note="2'- fluoro-uridine"
  misc_feature 15: /note="2'-O-Methyluridine"
  misc_feature 16: /note="2'- fluoro-uridine"
  misc_feature 17: /note="2'-O-Methyluridine"
  misc_feature 18: /note="2'-fluoroadenosine"
  misc_feature 19: /note="2'-O-Methyladenosine"
  misc_feature 20: /note="2'-fluoroadenosine"
  misc_feature 21: /note="2'-O-Methyladenosine"
  misc_feature 22: /note="2'- fluoro-uridine"
  misc_feature 23: /note="Inverted DNA thymine"
ccauauggugacuuuuuaaaaut

SEQ ID NO: 41 - RNA, 21 nt, Artificial Sequence
  Synthetic Construct
  misc_feature 1: /note="2'-fluoroadenosine"
  misc_feature 2: /note="2'- fluoro-uridine"
  misc_feature 3: /note="2'-O-Methyluridine"
  misc_feature 4: /note="2'- fluoro-uridine"
  misc_feature 5: /note="2'-O-Methyluridine"
  misc_feature 6: /note="2'-fluoroadenosine"
  misc_feature 7: /note="2'-O-Methyladenosine"
  misc_feature 8: /note="2'-fluoroadenosine"
  misc_feature 9: /note="2'-O-Methyladenosine"
  misc_feature 10: /note="2'-fluoroadenosine"
  misc_feature 11: /note="2'-O-Methylguanosine"
  misc_feature 12: /note="2'- fluoro-uridine"
  misc_feature 13: /note="2'-O-Methylcytidine"
  misc_feature 14: /note="2'-fluoroadenosine"
  misc_feature 15: /note="2'-O-Methylcytidine"
  misc_feature 16: /note="2'-fluoroadenosine"
  misc_feature 16: /note="2'-Fluoro-cytidine"
  misc_feature 17: /note="2'-O-Methyladenosine"
  misc_feature 18: /note="2'- fluoro-uridine"
  misc_feature 19: /note="2'-O-Methyladenosine"
  misc_feature 20: /note="DNA thymine"
  misc_feature 21: /note="DNA thymine"
auuuuaaaaagucaccauatt

SEQ ID NO: 42 - RNA, 23 nt, Artificial Sequence
  Synthetic Construct
  misc_feature 1: /note="2'-O-Methylcytidine"
  misc_feature 2: /note="2'-O-Methylcytidine"
  misc_feature 3: /note="2'-O-Methyladenosine"
  misc_feature 4: /note="2'-Fluoro-guanosine"
  misc_feature 5: /note="2'-O-Methylguanosine"
  misc_feature 6: /note="2'-Fluoro-cytidine"
  misc_feature 7: /note="2'-O-Methyluridine"
  misc_feature 8: /note="2'-Fluoro-cytidine"
  misc_feature 9: /note="2'-O-Methyluridine"
  misc_feature 10: /note="2'-Fluoro-guanosine"
  misc_feature 11: /note="2'-O-Methylguanosine"
  misc_feature 12: /note="2'- fluoro-uridine"
  misc_feature 13: /note="2'-O-Methylguanosine"
  misc_feature 14: /note="2'-Fluoro-guanosine"
  misc_feature 15: /note="2'-O-Methylcytidine"
  misc_feature 16: /note="2'-Fluoro-guanosine"
  misc_feature 17: /note="2'-O-Methyluridine"
  misc_feature 18: /note="2'-Fluoro-guanosine"
  misc_feature 19: /note="2'-O-Methyladenosine"
  misc_feature 20: /note="2'- fluoro-uridine"
  misc_feature 21: /note="2'-O-Methylcytidine"
  misc_feature 22: /note="2'- fluoro-uridine"
  misc_feature 23: /note="Inverted DNA thymine"
ccaggcucugguggcgugaucut

SEQ ID NO: 43 - RNA, 21 nt, Artificial Sequence
  Synthetic Construct
  misc_feature 1: /note="2'-fluoroadenosine"
  misc_feature 2: /note="2'-Fluoro-guanosine"
  misc_feature 3: /note="2'-O-Methyladenosine"
  misc_feature 4: /note="2'- fluoro-uridine"
  misc_feature 5: /note="2'-O-Methylcytidine"
  misc_feature 6: /note="2'-fluoroadenosine"
  misc_feature 7: /note="2'-O-Methylcytidine"
  misc_feature 8: /note="2'-Fluoro-guanosine"
  misc_feature 9: /note="2'-O-Methylcytidine"
  misc_feature 10: /note="2'-Fluoro-cytidine"
  misc_feature 11: /note="2'-O-Methyladenosine"
  misc_feature 12: /note="2'-Fluoro-cytidine"
  misc_feature 13: /note="2'-O-Methylcytidine"
  misc_feature 14: /note="2'-fluoroadenosine"
  misc_feature 15: /note="2'-O-Methylguanosine"
  misc_feature 16: /note="2'-fluoroadenosine"
  misc_feature 17: /note="2'-O-Methylguanosine"
  misc_feature 18: /note="2'-Fluoro-cytidine"
  misc_feature 19: /note="2'-O-Methylcytidine"
  misc_feature 20: /note="DNA thymine"
  misc_feature 21: /note="DNA thymine"
agaucacgccaccagagcctt

SEQ ID NO: 44 - RNA, 23 nt, Artificial Sequence
  Synthetic Construct
  misc_feature 1: /note="2'-O-Methylcytidine"
  misc_feature 2: /note="2'-O-Methylcytidine"
  misc_feature 3: /note="2'-O-Methyladenosine"
  misc_feature 4: /note="2'-Fluoro-guanosine"
  misc_feature 5: /note="2'-O-Methylcytidine"
  misc_feature 6: /note="2'- fluoro-uridine"
  misc_feature 7: /note="2'-O-Methylcytidine"
  misc_feature 8: /note="2'- fluoro-uridine"
  misc_feature 10: /note="2'-Fluoro-guanosine"
  misc_feature 11: /note="2'-O-Methyluridine"
  misc_feature 12: /note="2'-Fluoro-guanosine"
  misc_feature 14: /note="2'-Fluoro-cytidine"
  misc_feature 15: /note="2'-O-Methylguanosine"
  misc_feature 16: /note="2'- fluoro-uridine"
  misc_feature 17: /note="2'-O-Methylguanosine"
  misc_feature 18: /note="2'-fluoroadenosine"
  misc_feature 19: /note="2'-O-Methyluridine"
  misc_feature 20: /note="2'-Fluoro-cytidine"
  misc_feature 21: /note="2'-O-Methyluridine"
  misc_feature 22: /note="2'-Fluoro-guanosine"
  misc_feature 23: /note="Inverted DNA thymine"
ccagcucugguggcgugaucugt

SEQ ID NO: 45 - RNA, 21 nt, Artificial Sequence
  Synthetic Construct
  misc_feature 1: /note="2'-Fluoro-cytidine"
  misc_feature 2: /note="2'-fluoroadenosine"
  misc_feature 3: /note="2'-O-Methylguanosine"
  misc_feature 4: /note="2'-fluoroadenosine"
  misc_feature 5: /note="2'-O-Methyluridine"
  misc_feature 6: /note="2'-Fluoro-cytidine"
  misc_feature 7: /note="2'-O-Methyladenosine"
  misc_feature 8: /note="2'-Fluoro-cytidine"
  misc_feature 9: /note="2'-O-Methylguanosine"
  misc_feature 10: /note="2'-Fluoro-cytidine"
  misc_feature 11: /note="2'-O-Methylcytidine"
  misc_feature 12: /note="2'-fluoroadenosine"
  misc_feature 13: /note="2'-O-Methylcytidine"
  misc_feature 14: /note="2'-Fluoro-cytidine"
  misc_feature 15: /note="2'-O-Methyladenosine"
  misc_feature 16: /note="2'-Fluoro-guanosine"
  misc_feature 17: /note="2'-O-Methyladenosine"
  misc_feature 18: /note="2'-Fluoro-guanosine"
  misc_feature 19: /note="2'-O-Methylcytidine"
  misc_feature 20: /note="DNA thymine"
  misc_feature 21: /note="DNA thymine"
cagaucacgccaccagagctt

SEQ ID NO: 46 - RNA, 23 nt, Artificial Sequence
  Synthetic Construct
  misc_feature 1: /note="2'-O-Methylcytidine"
  misc_feature 2: /note="2'-O-Methylcytidine"
  misc_feature 3: /note="2'-O-Methyladenosine"
  misc_feature 4: /note="2'-Fluoro-cytidine"
  misc_feature 5: /note="2'-O-Methyluridine"
  misc_feature 6: /note="2'-Fluoro-cytidine"
  misc_feature 7: /note="2'-O-Methyluridine"
  misc_feature 8: /note="2'-Fluoro-guanosine"
  misc_feature 9: /note="2'-O-Methylguanosine"
  misc_feature 10: /note="2'- fluoro-uridine"
  misc_feature 11: /note="2'-O-Methylguanosine"
  misc_feature 12: /note="2'-Fluoro-guanosine"
  misc_feature 13: /note="2'-O-Methylcytidine"
  misc_feature 14: /note="2'-Fluoro-guanosine"
  misc_feature 15: /note="2'-O-Methyluridine"
  misc_feature 16: /note="2'-Fluoro-guanosine"
  misc_feature 17: /note="2'-O-Methyladenosine"
  misc_feature 18: /note="2'- fluoro-uridine"
  misc_feature 19: /note="2'-O-Methylcytidine"
  misc_feature 20: /note="2'- fluoro-uridine"
  misc_feature 21: /note="2'-O-Methylguanosine"
  misc_feature 22: /note="2'-Fluoro-cytidine"
  misc_feature 23: /note="Inverted DNA thymine"
ccacucugguggcgugaucugct

SEQ ID NO: 47 - RNA, 21 nt, Artificial Sequence
  Synthetic Construct
  misc_feature 1: /note="2'-Fluoro-guanosine"
  misc_feature 2: /note="2'-Fluoro-cytidine"
  misc_feature 3: /note="2'-O-Methyladenosine"
  misc_feature 4: /note="2'-Fluoro-guanosine"
  misc_feature 5: /note="2'-O-Methyladenosine"
  misc_feature 6: /note="2'- fluoro-uridine"
  misc_feature 7: /note="2'-O-Methylcytidine"
  misc_feature 8: /note="2'-fluoroadenosine"
  misc_feature 9: /note="2'-O-Methylcytidine"
  misc_feature 10: /note="2'-Fluoro-guanosine"
  misc_feature 11: /note="2'-O-Methylcytidine"
  misc_feature 12: /note="2'-Fluoro-cytidine"
  misc_feature 13: /note="2'-O-Methyladenosine"
  misc_feature 14: /note="2'-Fluoro-cytidine"
  misc_feature 15: /note="2'-O-Methylcytidine"
  misc_feature 16: /note="2'-fluoroadenosine"
  misc_feature 17: /note="2'-O-Methylguanosine"
  misc_feature 18: /note="2'-fluoroadenosine"
  misc_feature 19: /note="2'-O-Methyluridine"
  misc_feature 20: /note="DNA thymine"
  misc_feature 21: /note="DNA thymine"
gcagaucacgccaccagagtt

SEQ ID NO: 48 - RNA, 23 nt, Artificial Sequence
  Synthetic Construct
  misc_feature 1: /note="2'-O-Methylcytidine"
  misc_feature 2: /note="2'-O-Methylcytidine"
  misc_feature 3: /note="2'-O-Methyladenosine"
  misc_feature 4: /note="2'- fluoro-uridine"
  misc_feature 5: /note="2'-O-Methylcytidine"
  misc_feature 6: /note="2'- fluoro-uridine"
  misc_feature 7: /note="2'-O-Methylguanosine"
  misc_feature 8: /note="2'-Fluoro-guanosine"
  misc_feature 9: /note="2'-O-Methyluridine"
  misc_feature 10: /note="2'-Fluoro-guanosine"
  misc_feature 11: /note="2'-O-Methylguanosine"
  misc_feature 12: /note="2'-Fluoro-cytidine"
  misc_feature 13: /note="2'-O-Methylguanosine"
  misc_feature 14: /note="2'- fluoro-uridine"
  misc_feature 15: /note="2'-O-Methylguanosine"
  misc_feature 16: /note="2'-fluoroadenosine"
  misc_feature 17: /note="2'-O-Methyluridine"
  misc_feature 18: /note="2'-Fluoro-cytidine"
  misc_feature 19: /note="2'-O-Methyluridine"
  misc_feature 20: /note="2'-Fluoro-guanosine"
  misc_feature 21: /note="2'-O-Methylcytidine"
  misc_feature 22: /note="2'-Fluoro-guanosine"
  misc_feature 23: /note="Inverted DNA thymine"
ccaucugguggcgugaucugcgt

SEQ ID NO: 49 - RNA, 21 nt, Artificial Sequence
  Synthetic Construct
  misc_feature 1: /note="2'-Fluoro-cytidine"
  misc_feature 2: /note="2'-Fluoro-guanosine"
  misc_feature 3: /note="2'-O-Methylcytidine"
  misc_feature 4: /note="2'-fluoroadenosine"
  misc_feature 5: /note="2'-O-Methylguanosine"
  misc_feature 6: /note="2'-fluoroadenosine"
  misc_feature 7: /note="2'-O-Methyluridine"
  misc_feature 8: /note="2'-Fluoro-cytidine"
  misc_feature 9: /note="2'-O-Methyladenosine"
  misc_feature 10: /note="2'-Fluoro-cytidine"
  misc_feature 11: /note="2'-O-Methylguanosine"
  misc_feature 12: /note="2'-Fluoro-cytidine"
  misc_feature 13: /note="2'-O-Methylcytidine"
  misc_feature 14: /note="2'-fluoroadenosine"
  misc_feature 15: /note="2'-O-Methylcytidine"
  misc_feature 16: /note="2'-Fluoro-cytidine"
  misc_feature 17: /note="2'-O-Methyladenosine"
  misc_feature 18: /note="2'-Fluoro-guanosine"
  misc_feature 19: /note="2'-O-Methyladenosine"
  misc_feature 20: /note="DNA thymine"
  misc_feature 21: /note="DNA thymine"
cgcagaucacgccaccagatt

SEQ ID NO: 50 - RNA, 23 nt, Artificial Sequence
  Synthetic Construct
  misc_feature 1: /note="2'-O-Methylcytidine"
  misc_feature 2: /note="2'-O-Methylcytidine"
  misc_feature 3: /note="2'-O-Methyladenosine"
  misc_feature 4: /note="2'-Fluoro-cytidine"
  misc_feature 5: /note="2'-O-Methyladenosine"
  misc_feature 6: /note="2'-Fluoro-guanosine"
  misc_feature 7: /note="2'-O-Methylguanosine"
  misc_feature 8: /note="2'-Fluoro-cytidine"
  misc_feature 9: /note="2'-O-Methylguanosine"
  misc_feature 10: /note="2'- fluoro-uridine"
  misc_feature 11: /note="2'-O-Methylcytidine"
  misc_feature 12: /note="2'-fluoroadenosine"
  misc_feature 13: /note="2'-O-Methyladenosine"
  misc_feature 14: /note="2'-Fluoro-guanosine"
  misc_feature 15: /note="2'-O-Methylcytidine"
  misc_feature 16: /note="2'-fluoroadenosine"
  misc_feature 17: /note="2'-O-Methylcytidine"
  misc_feature 18: /note="2'-Fluoro-cytidine"
  misc_feature 19: /note="2'-O-Methylcytidine"
  misc_feature 20: /note="2'-fluoroadenosine"
  misc_feature 21: /note="2'-O-Methylcytidine"
  misc_feature 22: /note="2'-fluoroadenosine"
  misc_feature 23: /note="Inverted DNA thymine"
ccacaggcgucaagcacccacat

SEQ ID NO: 51 - RNA, 21 nt, Artificial Sequence
  Synthetic Construct
  misc_feature 1: /note="2'- fluoro-uridine"
  misc_feature 2: /note="2'-Fluoro-guanosine"
  misc_feature 3: /note="2'-O-Methyluridine"
  misc_feature 4: /note="2'-Fluoro-guanosine"
  misc_feature 5: /note="2'-O-Methylguanosine"
  misc_feature 6: /note="2'-Fluoro-guanosine"
  misc_feature 7: /note="2'-O-Methyluridine"
  misc_feature 8: /note="2'-Fluoro-guanosine"
  misc_feature 9: /note="2'-O-Methylcytidine"
  misc_feature 10: /note="2'- fluoro-uridine"
  misc_feature 11: /note="2'-O-Methyluridine"
  misc_feature 12: /note="2'-Fluoro-guanosine"
  misc_feature 13: /note="2'-O-Methyladenosine"
  misc_feature 14: /note="2'-Fluoro-cytidine"
  misc_feature 15: /note="2'-O-Methylguanosine"
  misc_feature 16: /note="2'-Fluoro-cytidine"
  misc_feature 17: /note="2'-O-Methylcytidine"
  misc_feature 18: /note="2'- fluoro-uridine"
  misc_feature 19: /note="2'-O-Methylguanosine"
  misc_feature 20: /note="DNA thymine"
  misc_feature 21: /note="DNA thymine"
ugugggugcuugacgccugtt

SEQ ID NO: 52 - RNA, 23 nt, Artificial Sequence
  Synthetic Construct
  misc_feature 1: /note="2'-O-Methylcytidine"
  misc_feature 2: /note="2'-O-Methylcytidine"
  misc_feature 3: /note="2'-O-Methyladenosine"
  misc_feature 4: /note="2'-fluoroadenosine"
  misc_feature 5: /note="2'-O-Methylguanosine"
  misc_feature 6: /note="2'-Fluoro-guanosine"
  misc_feature 7: /note="2'-O-Methylcytidine"
  misc_feature 8: /note="2'-Fluoro-guanosine"
  misc_feature 9: /note="2'-O-Methyluridine"
  misc_feature 10: /note="2'-Fluoro-cytidine"
  misc_feature 11: /note="2'-O-Methyladenosine"
  misc_feature 12: /note="2'-fluoroadenosine"
  misc_feature 13: /note="2'-O-Methylguanosine"
  misc_feature 14: /note="2'-Fluoro-cytidine"
  misc_feature 15: /note="2'-O-Methyladenosine"
  misc_feature 16: /note="2'-Fluoro-cytidine"
  misc_feature 17: /note="2'-O-Methylcytidine"
  misc_feature 18: /note="2'-Fluoro-cytidine"
  misc_feature 19: /note="2'-O-Methyladenosine"
  misc_feature 20: /note="2'-Fluoro-cytidine"
  misc_feature 21: /note="2'-O-Methyladenosine"
  misc_feature 22: /note="2'-Fluoro-cytidine"
  misc_feature 23: /note="Inverted DNA thymine"
ccaaggcgucaagcacccacact

SEQ ID NO: 53 - RNA, 21 nt, Artificial Sequence
  Synthetic Construct
  misc_feature 1: /note="2'-Fluoro-guanosine"
  misc_feature 2: /note="2'- fluoro-uridine"
  misc_feature 3: /note="2'-O-Methylguanosine"
  misc_feature 4: /note="2'- fluoro-uridine"
  misc_feature 5: /note="2'-O-Methylguanosine"
  misc_feature 6: /note="2'-Fluoro-guanosine"
  misc_feature 7: /note="2'-O-Methylguanosine"
  misc_feature 8: /note="2'- fluoro-uridine"
  misc_feature 9: /note="2'-O-Methylguanosine"
  misc_feature 10: /note="2'-Fluoro-cytidine"
  misc_feature 11: /note="2'-O-Methyluridine"
  misc_feature 12: /note="2'- fluoro-uridine"
  misc_feature 13: /note="2'-O-Methylguanosine"
  misc_feature 14: /note="2'-fluoroadenosine"
  misc_feature 15: /note="2'-O-Methylcytidine"
  misc_feature 16: /note="2'-Fluoro-guanosine"
  misc_feature 17: /note="2'-O-Methylcytidine"
  misc_feature 18: /note="2'-Fluoro-cytidine"
  misc_feature 19: /note="2'-O-Methyluridine"
  misc_feature 20: /note="DNA thymine"
  misc_feature 21: /note="DNA thymine"
gugugggugcuugacgccutt

SEQ ID NO: 54 - RNA, 23 nt, Artificial Sequence
  Synthetic Construct
  misc_feature 1: /note="2'-O-Methylcytidine"
  misc_feature 2: /note="2'-O-Methylcytidine"
  misc_feature 3: /note="2'-O-Methyladenosine"
  misc_feature 4: /note="2'-Fluoro-cytidine"
  misc_feature 5: /note="2'-O-Methylguanosine"
  misc_feature 6: /note="2'- fluoro-uridine"
  misc_feature 7: /note="2'-O-Methylcytidine"
  misc_feature 8: /note="2'-fluoroadenosine"
  misc_feature 9: /note="2'-O-Methyladenosine"
  misc_feature 10: /note="2'-Fluoro-guanosine"
  misc_feature 11: /note="2'-O-Methylcytidine"
  misc_feature 12: /note="2'-fluoroadenosine"
  misc_feature 13: /note="2'-O-Methylcytidine"
  misc_feature 14: /note="2'-Fluoro-cytidine"
  misc_feature 15: /note="2'-O-Methylcytidine"
  misc_feature 16: /note="2'-fluoroadenosine"
  misc_feature 17: /note="2'-O-Methylcytidine"
  misc_feature 18: /note="2'-fluoroadenosine"
  misc_feature 19: /note="2'-O-Methylcytidine"
  misc_feature 20: /note="2'-Fluoro-cytidine"
  misc_feature 21: /note="2'-O-Methylcytidine"
  misc_feature 22: /note="2'- fluoro-uridine"
  misc_feature 23: /note="Inverted DNA thymine"
ccacgucaagcacccacacccut

SEQ ID NO: 55 - RNA, 21 nt, Artificial Sequence
  Synthetic Construct
  misc_feature 1: /note="2'-fluoroadenosine"
  misc_feature 2: /note="2'-Fluoro-guanosine"
  misc_feature 3: /note="2'-O-Methylguanosine"
  misc_feature 4: /note="2'-Fluoro-guanosine"
  misc_feature 5: /note="2'-O-Methyluridine"
  misc_feature 6: /note="2'-Fluoro-guanosine"
  misc_feature 7: /note="2'-O-Methyluridine"
  misc_feature 8: /note="2'-Fluoro-guanosine"
  misc_feature 9: /note="2'-O-Methylguanosine"
  misc_feature 10: /note="2'-Fluoro-guanosine"
  misc_feature 11: /note="2'-O-Methyluridine"
  misc_feature 12: /note="2'-Fluoro-guanosine"
  misc_feature 13: /note="2'-O-Methylcytidine"
  misc_feature 14: /note="2'- fluoro-uridine"
  misc_feature 15: /note="2'-O-Methyluridine"
  misc_feature 16: /note="2'-Fluoro-guanosine"
  misc_feature 17: /note="2'-O-Methyladenosine"
  misc_feature 18: /note="2'-Fluoro-cytidine"
  misc_feature 19: /note="2'-O-Methylguanosine"
  misc_feature 20: /note="DNA thymine"
  misc_feature 21: /note="DNA thymine"
agggugugggugcuugacgtt

SEQ ID NO: 56 - RNA, 23 nt, Artificial Sequence
  Synthetic Construct
  misc_feature 1: /note="2'-O-Methylcytidine"
  misc_feature 2: /note="2'-O-Methylcytidine"
  misc_feature 3: /note="2'-O-Methyladenosine"
  misc_feature 4: /note="2'-Fluoro-guanosine"
  misc_feature 5: /note="2'-O-Methyluridine"
  misc_feature 6: /note="2'-Fluoro-cytidine"
  misc_feature 7: /note="2'-O-Methyladenosine"
  misc_feature 8: /note="2'-fluoroadenosine"
  misc_feature 9: /note="2'-O-Methylguanosine"
  misc_feature 10: /note="2'-Fluoro-cytidine"
  misc_feature 11: /note="2'-O-Methyladenosine"
  misc_feature 12: /note="2'-Fluoro-cytidine"
  misc_feature 13: /note="2'-O-Methylcytidine"
  misc_feature 14: /note="2'-Fluoro-cytidine"
  misc_feature 15: /note="2'-O-Methyladenosine"
  misc_feature 16: /note="2'-Fluoro-cytidine"
  misc_feature 17: /note="2'-O-Methyladenosine"
  misc_feature 18: /note="2'-Fluoro-cytidine"
  misc_feature 19: /note="2'-O-Methylcytidine"
  misc_feature 20: /note="2'-Fluoro-cytidine"
  misc_feature 21: /note="2'-O-Methyluridine"
  misc_feature 22: /note="2'-fluoroadenosine"
  misc_feature 23: /note="Inverted DNA thymine"
ccagucaagcacccacacccuat

SEQ ID NO: 57 - RNA, 21 nt, Artificial Sequence
  Synthetic Construct
  misc_feature 1: /note="2'- fluoro-uridine"
  misc_feature 2: /note="2'-fluoroadenosine"
  misc_feature 3: /note="2'-O-Methylguanosine"
  misc_feature 4: /note="2'-Fluoro-guanosine"
  misc_feature 5: /note="2'-O-Methylguanosine"
  misc_feature 6: /note="2'- fluoro-uridine"
  misc_feature 7: /note="2'-O-Methylguanosine"
  misc_feature 8: /note="2'- fluoro-uridine"
  misc_feature 9: /note="2'-O-Methylguanosine"
  misc_feature 10: /note="2'-Fluoro-guanosine"
  misc_feature 11: /note="2'-O-Methylguanosine"
  misc_feature 12: /note="2'- fluoro-uridine"
  misc_feature 13: /note="2'-O-Methylguanosine"
  misc_feature 14: /note="2'-Fluoro-cytidine"
  misc_feature 15: /note="2'-O-Methyluridine"
  misc_feature 16: /note="2'- fluoro-uridine"
  misc_feature 17: /note="2'-O-Methylguanosine"
  misc_feature 18: /note="2'-fluoroadenosine"
  misc_feature 19: /note="2'-O-Methylcytidine"
  misc_feature 20: /note="DNA thymine"
  misc_feature 21: /note="DNA thymine"
uagggugugggugcuugactt

SEQ ID NO: 58 - RNA, 23 nt, Artificial Sequence
  Synthetic Construct
  misc_feature 1: /note="2'-O-Methylcytidine"
  misc_feature 2: /note="2'-O-Methylcytidine"
  misc_feature 3: /note="2'-O-Methyladenosine"
  misc_feature 4: /note="2'- fluoro-uridine"
  misc_feature 5: /note="2'-O-Methylcytidine"
  misc_feature 6: /note="2'-fluoroadenosine"
  misc_feature 7: /note="2'-O-Methyladenosine"
  misc_feature 8: /note="2'-Fluoro-guanosine"
  misc_feature 9: /note="2'-O-Methylcytidine"
  misc_feature 10: /note="2'-fluoroadenosine"
  misc_feature 11: /note="2'-O-Methylcytidine"
  misc_feature 12: /note="2'-Fluoro-cytidine"
  misc_feature 13: /note="2'-O-Methylcytidine"
  misc_feature 14: /note="2'-fluoroadenosine"
  misc_feature 15: /note="2'-O-Methylcytidine"
  misc_feature 16: /note="2'-fluoroadenosine"
  misc_feature 17: /note="2'-O-Methylcytidine"
  misc_feature 18: /note="2'-Fluoro-cytidine"
  misc_feature 19: /note="2'-O-Methylcytidine"
  misc_feature 20: /note="2'- fluoro-uridine"
  misc_feature 21: /note="2'-O-Methyladenosine"
  misc_feature 22: /note="2'-Fluoro-guanosine"
  misc_feature 23: /note="Inverted DNA thymine"
ccaucaagcacccacacccuagt

SEQ ID NO: 59 - RNA, 21 nt, Artificial Sequence
  Synthetic Construct
  misc_feature 1: /note="2'-Fluoro-cytidine"
  misc_feature 2: /note="2'- fluoro-uridine"
  misc_feature 3: /note="2'-O-Methyladenosine"
  misc_feature 4: /note="2'-Fluoro-guanosine"
  misc_feature 5: /note="2'-O-Methylguanosine"
  misc_feature 6: /note="2'-Fluoro-guanosine"
  misc_feature 7: /note="2'-O-Methyluridine"
  misc_feature 8: /note="2'-Fluoro-guanosine"
  misc_feature 9: /note="2'-O-Methyluridine"
  misc_feature 10: /note="2'-Fluoro-guanosine"
  misc_feature 11: /note="2'-O-Methylguanosine"
  misc_feature 12: /note="2'-Fluoro-guanosine"
  misc_feature 13: /note="2'-O-Methyluridine"
  misc_feature 14: /note="2'-Fluoro-guanosine"
  misc_feature 15: /note="2'-O-Methylcytidine"
  misc_feature 16: /note="2'- fluoro-uridine"
  misc_feature 17: /note="2'-O-Methyluridine"
  misc_feature 18: /note="2'-Fluoro-guanosine"
  misc_feature 19: /note="2'-O-Methyladenosine"
  misc_feature 20: /note="DNA thymine"
  misc_feature 21: /note="DNA thymine"
cuagggugugggugcuugatt

SEQ ID NO: 60 - RNA, 23 nt, Artificial Sequence
  Synthetic Construct
  misc_feature 1: /note="2'-O-Methylcytidine"
  misc_feature 2: /note="2'-O-Methylcytidine"
  misc_feature 3: /note="2'-O-Methyladenosine"
  misc_feature 4: /note="2'-Fluoro-cytidine"
  misc_feature 5: /note="2'-O-Methyladenosine"
  misc_feature 6: /note="2'-fluoroadenosine"
  misc_feature 7: /note="2'-O-Methylguanosine"
  misc_feature 8: /note="2'-Fluoro-cytidine"
  misc_feature 9: /note="2'-O-Methyladenosine"
  misc_feature 10: /note="2'-Fluoro-cytidine"
  misc_feature 11: /note="2'-O-Methylcytidine"
  misc_feature 12: /note="2'-Fluoro-cytidine"
  misc_feature 13: /note="2'-O-Methyladenosine"
  misc_feature 14: /note="2'-Fluoro-cytidine"
  misc_feature 15: /note="2'-O-Methyladenosine"
  misc_feature 16: /note="2'-Fluoro-cytidine"
  misc_feature 17: /note="2'-O-Methylcytidine"
  misc_feature 18: /note="2'-Fluoro-cytidine"
  misc_feature 19: /note="2'-O-Methyluridine"
  misc_feature 20: /note="2'-fluoroadenosine"
  misc_feature 21: /note="2'-O-Methylguanosine"
  misc_feature 22: /note="2'-fluoroadenosine"
  misc_feature 23: /note="Inverted DNA thymine"
ccacaagcacccacacccuagat

SEQ ID NO: 61 - RNA, 21 nt, Artificial Sequence
  Synthetic Construct
  misc_feature 1: /note="2'- fluoro-uridine"
  misc_feature 2: /note="2'-Fluoro-cytidine"
  misc_feature 3: /note="2'-O-Methyluridine"
  misc_feature 4: /note="2'-fluoroadenosine"
  misc_feature 5: /note="2'-O-Methylguanosine"
  misc_feature 6: /note="2'-Fluoro-guanosine"
  misc_feature 7: /note="2'-O-Methylguanosine"
  misc_feature 8: /note="2'- fluoro-uridine"
  misc_feature 9: /note="2'-O-Methylguanosine"
  misc_feature 10: /note="2'- fluoro-uridine"
  misc_feature 11: /note="2'-O-Methylguanosine"
  misc_feature 12: /note="2'-Fluoro-guanosine"
  misc_feature 13: /note="2'-O-Methylguanosine"
  misc_feature 14: /note="2'- fluoro-uridine"
  misc_feature 15: /note="2'-O-Methylguanosine"
  misc_feature 16: /note="2'-Fluoro-cytidine"
  misc_feature 17: /note="2'-O-Methyluridine"
  misc_feature 18: /note="2'- fluoro-uridine"
  misc_feature 19: /note="2'-O-Methylguanosine"
  misc_feature 20: /note="DNA thymine"
  misc_feature 21: /note="DNA thymine"
ucuagggugugggugcuugtt

SEQ ID NO: 62 - RNA, 23 nt, Artificial Sequence
  Synthetic Construct
  misc_feature 1: /note="2'-O-Methylcytidine"
  misc_feature 2: /note="2'-O-Methylcytidine"
  misc_feature 3: /note="2'-O-Methyladenosine"
  misc_feature 4: /note="2'-fluoroadenosine"
  misc_feature 5: /note="2'-O-Methyladenosine"
  misc_feature 6: /note="2'-Fluoro-guanosine"
  misc_feature 7: /note="2'-O-Methylcytidine"
  misc_feature 8: /note="2'-fluoroadenosine"
  misc_feature 9: /note="2'-O-Methylcytidine"
  misc_feature 10: /note="2'-Fluoro-cytidine"
  misc_feature 11: /note="2'-O-Methylcytidine"
  misc_feature 12: /note="2'-fluoroadenosine"
  misc_feature 13: /note="2'-O-Methylcytidine"
  misc_feature 14: /note="2'-fluoroadenosine"
  misc_feature 15: /note="2'-O-Methylcytidine"
  misc_feature 16: /note="2'-Fluoro-cytidine"
  misc_feature 17: /note="2'-O-Methylcytidine"
  misc_feature 18: /note="2'- fluoro-uridine"
  misc_feature 19: /note="2'-O-Methyladenosine"
  misc_feature 20: /note="2'-Fluoro-guanosine"
  misc_feature 21: /note="2'-O-Methyladenosine"
  misc_feature 22: /note="2'-fluoroadenosine"
  misc_feature 23: /note="Inverted DNA thymine"
ccaaagcacccacacccuagaat

SEQ ID NO: 63 - RNA, 21 nt, Artificial Sequence
  Synthetic Construct
  misc_feature 1: /note="2'- fluoro-uridine"
  misc_feature 2: /note="2'- fluoro-uridine"
  misc_feature 3: /note="2'-O-Methylcytidine"
  misc_feature 4: /note="2'- fluoro-uridine"
  misc_feature 5: /note="2'-O-Methyladenosine"
  misc_feature 6: /note="2'-Fluoro-guanosine"
  misc_feature 7: /note="2'-O-Methylguanosine"
  misc_feature 8: /note="2'-Fluoro-guanosine"
  misc_feature 9: /note="2'-O-Methyluridine"
  misc_feature 10: /note="2'-Fluoro-guanosine"
  misc_feature 11: /note="2'-O-Methyluridine"
  misc_feature 12: /note="2'-Fluoro-guanosine"
  misc_feature 13: /note="2'-O-Methylguanosine"
  misc_feature 14: /note="2'-Fluoro-guanosine"
  misc_feature 15: /note="2'-O-Methyluridine"
  misc_feature 16: /note="2'-Fluoro-guanosine"
  misc_feature 17: /note="2'-O-Methylcytidine"
  misc_feature 18: /note="2'- fluoro-uridine"
  misc_feature 19: /note="2'-O-Methyluridine"
  misc_feature 20: /note="DNA thymine"
  misc_feature 21: /note="DNA thymine"
uucuagggugugggugcuutt

SEQ ID NO: 64 - RNA, 23 nt, Artificial Sequence
  Synthetic Construct
  misc_feature 1: /note="2'-O-Methylcytidine"
  misc_feature 2: /note="2'-O-Methylcytidine"
  misc_feature 3: /note="2'-O-Methyladenosine"
  misc_feature 4: /note="2'-fluoroadenosine"
  misc_feature 5: /note="2'-O-Methylguanosine"
  misc_feature 6: /note="2'-Fluoro-cytidine"
  misc_feature 7: /note="2'-O-Methyladenosine"
  misc_feature 8: /note="2'-Fluoro-cytidine"
  misc_feature 9: /note="2'-O-Methylcytidine"
  misc_feature 10: /note="2'-Fluoro-cytidine"
  misc_feature 11: /note="2'-O-Methyladenosine"
  misc_feature 12: /note="2'-Fluoro-cytidine"
  misc_feature 13: /note="2'-O-Methyladenosine"
  misc_feature 14: /note="2'-Fluoro-cytidine"
  misc_feature 15: /note="2'-O-Methylcytidine"
  misc_feature 16: /note="2'-Fluoro-cytidine"
  misc_feature 17: /note="2'-O-Methyluridine"
  misc_feature 18: /note="2'-fluoroadenosine"
  misc_feature 19: /note="2'-O-Methylguanosine"
  misc_feature 20: /note="2'-fluoroadenosine"
  misc_feature 21: /note="2'-O-Methyladenosine"
  misc_feature 22: /note="2'-Fluoro-guanosine"
  misc_feature 23: /note="Inverted DNA thymine"
ccaagcacccacacccuagaagt

SEQ ID NO: 65 - RNA, 21 nt, Artificial Sequence
  Synthetic Construct
  misc_feature 1: /note="2'-Fluoro-cytidine"
  misc_feature 2: /note="2'- fluoro-uridine"
  misc_feature 3: /note="2'-O-Methyluridine"
  misc_feature 4: /note="2'-Fluoro-cytidine"
  misc_feature 5: /note="2'-O-Methyluridine"
  misc_feature 6: /note="2'-fluoroadenosine"
  misc_feature 7: /note="2'-O-Methylguanosine"
  misc_feature 8: /note="2'-Fluoro-guanosine"
  misc_feature 9: /note="2'-O-Methylguanosine"
  misc_feature 10: /note="2'- fluoro-uridine"
  misc_feature 11: /note="2'-O-Methylguanosine"
  misc_feature 12: /note="2'- fluoro-uridine"
  misc_feature 13: /note="2'-O-Methylguanosine"
  misc_feature 14: /note="2'-Fluoro-guanosine"
  misc_feature 15: /note="2'-O-Methylguanosine"
  misc_feature 16: /note="2'- fluoro-uridine"
  misc_feature 17: /note="2'-O-Methylguanosine"
  misc_feature 18: /note="2'-Fluoro-cytidine"
  misc_feature 19: /note="2'-O-Methyluridine"
  misc_feature 20: /note="DNA thymine"
  misc_feature 21: /note="DNA thymine"
cuucuagggugugggugcutt

SEQ ID NO: 66 - RNA, 23 nt, Artificial Sequence
  Synthetic Construct
  misc_feature 1: /note="2'-O-Methylcytidine"
  misc_feature 2: /note="2'-O-Methylcytidine"
  misc_feature 3: /note="2'-O-Methyladenosine"
  misc_feature 4: /note="2'-Fluoro-guanosine"
  misc_feature 5: /note="2'-O-Methylcytidine"
  misc_feature 6: /note="2'-fluoroadenosine"
  misc_feature 7: /note="2'-O-Methylcytidine"
  misc_feature 8: /note="2'-Fluoro-cytidine"
  misc_feature 9: /note="2'-O-Methylcytidine"
  misc_feature 10: /note="2'-fluoroadenosine"
  misc_feature 11: /note="2'-O-Methylcytidine"
  misc_feature 12: /note="2'-fluoroadenosine"
  misc_feature 13: /note="2'-O-Methylcytidine"
  misc_feature 14: /note="2'-Fluoro-cytidine"
  misc_feature 15: /note="2'-O-Methylcytidine"
  misc_feature 16: /note="2'- fluoro-uridine"
  misc_feature 17: /note="2'-O-Methyladenosine"
  misc_feature 18: /note="2'-Fluoro-guanosine"
  misc_feature 19: /note="2'-O-Methyladenosine"
  misc_feature 20: /note="2'-fluoroadenosine"
  misc_feature 21: /note="2'-O-Methylguanosine"
  misc_feature 22: /note="2'-Fluoro-guanosine"
  misc_feature 23: /note="Inverted DNA thymine"
ccagcacccacacccuagaaggt

SEQ ID NO: 67 - RNA, 21 nt, Artificial Sequence
  Synthetic Construct
  misc_feature 1: /note="2'-Fluoro-cytidine"
  misc_feature 2: /note="2'-Fluoro-cytidine"
  misc_feature 3: /note="2'-O-Methyluridine"
  misc_feature 4: /note="2'- fluoro-uridine"
  misc_feature 5: /note="2'-O-Methylcytidine"
  misc_feature 6: /note="2'- fluoro-uridine"
  misc_feature 7: /note="2'-O-Methyladenosine"
  misc_feature 8: /note="2'-Fluoro-guanosine"
  misc_feature 9: /note="2'-O-Methylguanosine"
  misc_feature 10: /note="2'-Fluoro-guanosine"
  misc_feature 11: /note="2'-O-Methyluridine"
  misc_feature 12: /note="2'-Fluoro-guanosine"
  misc_feature 13: /note="2'-O-Methyluridine"
  misc_feature 14: /note="2'-Fluoro-guanosine"
  misc_feature 15: /note="2'-O-Methylguanosine"
  misc_feature 16: /note="2'-Fluoro-guanosine"
  misc_feature 17: /note="2'-O-Methyluridine"
  misc_feature 18: /note="2'-Fluoro-guanosine"
  misc_feature 19: /note="2'-O-Methylcytidine"
  misc_feature 20: /note="DNA thymine"
  misc_feature 21: /note="DNA thymine"
ccuucuagggugugggugctt

SEQ ID NO: 68 - RNA, 23 nt, Artificial Sequence
  Synthetic Construct
  misc_feature 1: /note="2'-O-Methylcytidine"
  misc_feature 2: /note="2'-O-Methylcytidine"
  misc_feature 3: /note="2'-O-Methyladenosine"
  misc_feature 4: /note="2'-Fluoro-cytidine"
  misc_feature 5: /note="2'-O-Methyladenosine"
  misc_feature 6: /note="2'-Fluoro-cytidine"
  misc_feature 7: /note="2'-O-Methylcytidine"
  misc_feature 8: /note="2'-Fluoro-cytidine"
  misc_feature 9: /note="2'-O-Methyladenosine"
  misc_feature 10: /note="2'-Fluoro-cytidine"
  misc_feature 11: /note="2'-O-Methyladenosine"
  misc_feature 12: /note="2'-Fluoro-cytidine"
  misc_feature 13: /note="2'-O-Methylcytidine"
  misc_feature 14: /note="2'-Fluoro-cytidine"
  misc_feature 15: /note="2'-O-Methyluridine"
  misc_feature 16: /note="2'-fluoroadenosine"
  misc_feature 17: /note="2'-O-Methylguanosine"
  misc_feature 18: /note="2'-fluoroadenosine"
  misc_feature 19: /note="2'-O-Methyladenosine"
  misc_feature 20: /note="2'-Fluoro-guanosine"
  misc_feature 21: /note="2'-O-Methylguanosine"
  misc_feature 22: /note="2'- fluoro-uridine"
  misc_feature 23: /note="Inverted DNA thymine"
ccacacccacacccuagaaggut

SEQ ID NO: 69 - RNA, 21 nt, Artificial Sequence
  Synthetic Construct
  misc_feature 1: /note="2'-fluoroadenosine"
  misc_feature 2: /note="2'-Fluoro-cytidine"
  misc_feature 3: /note="2'-O-Methylcytidine"
  misc_feature 4: /note="2'- fluoro-uridine"
  misc_feature 5: /note="2'-O-Methyluridine"
  misc_feature 6: /note="2'-Fluoro-cytidine"
  misc_feature 7: /note="2'-O-Methyluridine"
  misc_feature 8: /note="2'-fluoroadenosine"
  misc_feature 9: /note="2'-O-Methylguanosine"
  misc_feature 10: /note="2'-Fluoro-guanosine"
  misc_feature 11: /note="2'-O-Methylguanosine"
  misc_feature 12: /note="2'- fluoro-uridine"
  misc_feature 13: /note="2'-O-Methylguanosine"
  misc_feature 14: /note="2'- fluoro-uridine"
  misc_feature 15: /note="2'-O-Methylguanosine"
  misc_feature 16: /note="2'-Fluoro-guanosine"
  misc_feature 17: /note="2'-O-Methylguanosine"
  misc_feature 18: /note="2'- fluoro-uridine"
  misc_feature 19: /note="2'-O-Methylguanosine"
  misc_feature 20: /note="DNA thymine"
  misc_feature 21: /note="DNA thymine"
accuucuagggugugggugtt

SEQ ID NO: 70 - RNA, 23 nt, Artificial Sequence
  Synthetic Construct
  misc_feature 1: /note="2'-O-Methylcytidine"
  misc_feature 2: /note="2'-O-Methylcytidine"
  misc_feature 3: /note="2'-O-Methyladenosine"
  misc_feature 4: /note="2'-fluoroadenosine"
  misc_feature 5: /note="2'-O-Methylcytidine"
  misc_feature 6: /note="2'-Fluoro-cytidine"
  misc_feature 7: /note="2'-O-Methylcytidine"
  misc_feature 8: /note="2'-fluoroadenosine"
  misc_feature 9: /note="2'-O-Methylcytidine"
  misc_feature 10: /note="2'-fluoroadenosine"
  misc_feature 11: /note="2'-O-Methylcytidine"
  misc_feature 12: /note="2'-Fluoro-cytidine"
  misc_feature 13: /note="2'-O-Methylcytidine"
  misc_feature 14: /note="2'- fluoro-uridine"
  misc_feature 15: /note="2'-O-Methyladenosine"
  misc_feature 16: /note="2'-Fluoro-guanosine"
  misc_feature 17: /note="2'-O-Methyladenosine"
  misc_feature 18: /note="2'-fluoroadenosine"
  misc_feature 19: /note="2'-O-Methylguanosine"
  misc_feature 20: /note="2'-Fluoro-guanosine"
  misc_feature 21: /note="2'-O-Methyluridine"
  misc_feature 22: /note="2'- fluoro-uridine"
  misc_feature 23: /note="Inverted DNA thymine"
ccaacccacacccuagaagguut

SEQ ID NO: 71 - RNA, 21 nt, Artificial Sequence
  Synthetic Construct
  misc_feature 1: /note="2'-fluoroadenosine"
  misc_feature 2: /note="2'-fluoroadenosine"
  misc_feature 3: /note="2'-O-Methylcytidine"
  misc_feature 4: /note="2'-Fluoro-cytidine"
  misc_feature 5: /note="2'-O-Methyluridine"
  misc_feature 6: /note="2'- fluoro-uridine"
  misc_feature 7: /note="2'-O-Methylcytidine"
  misc_feature 8: /note="2'- fluoro-uridine"
  misc_feature 9: /note="2'-O-Methyladenosine"
  misc_feature 10: /note="2'-Fluoro-guanosine"
  misc_feature 11: /note="2'-O-Methylguanosine"
  misc_feature 12: /note="2'-Fluoro-guanosine"
  misc_feature 13: /note="2'-O-Methyluridine"
  misc_feature 14: /note="2'-Fluoro-guanosine"
  misc_feature 15: /note="2'-O-Methyluridine"
  misc_feature 16: /note="2'-Fluoro-guanosine"
  misc_feature 17: /note="2'-O-Methylguanosine"
  misc_feature 18: /note="2'-Fluoro-guanosine"
  misc_feature 19: /note="2'-O-Methyluridine"
  misc_feature 20: /note="DNA thymine"
  misc_feature 21: /note="DNA thymine"
aaccuucuagggugugggutt

SEQ ID NO: 72 - RNA, 23 nt, Artificial Sequence
  Synthetic Construct
  misc_feature 1: /note="2'-O-Methylcytidine"
  misc_feature 2: /note="2'-O-Methylcytidine"
  misc_feature 3: /note="2'-O-Methyladenosine"
  misc_feature 4: /note="2'-Fluoro-cytidine"
  misc_feature 5: /note="2'-O-Methylcytidine"
  misc_feature 6: /note="2'-Fluoro-cytidine"
  misc_feature 7: /note="2'-O-Methyladenosine"
  misc_feature 8: /note="2'-Fluoro-cytidine"
  misc_feature 9: /note="2'-O-Methyladenosine"
  misc_feature 10: /note="2'-Fluoro-cytidine"
  misc_feature 11: /note="2'-O-Methylcytidine"
  misc_feature 12: /note="2'-Fluoro-cytidine"
  misc_feature 13: /note="2'-O-Methyluridine"
  misc_feature 14: /note="2'-fluoroadenosine"
  misc_feature 15: /note="2'-O-Methylguanosine"
  misc_feature 16: /note="2'-fluoroadenosine"
  misc_feature 17: /note="2'-O-Methyladenosine"
  misc_feature 18: /note="2'-Fluoro-guanosine"
  misc_feature 19: /note="2'-O-Methylguanosine"
  misc_feature 20: /note="2'- fluoro-uridine"
  misc_feature 21: /note="2'-O-Methyluridine"
  misc_feature 22: /note="2'- fluoro-uridine"
  misc_feature 23: /note="Inverted DNA thymine"
ccacccacacccuagaagguuut

SEQ ID NO: 73 - RNA, 21 nt, Artificial Sequence
  Synthetic Construct
  misc_feature 1: /note="2'-fluoroadenosine"
  misc_feature 2: /note="2'-fluoroadenosine"
  misc_feature 3: /note="2'-O-Methyladenosine"
  misc_feature 4: /note="2'-Fluoro-cytidine"
  misc_feature 5: /note="2'-O-Methylcytidine"
  misc_feature 6: /note="2'- fluoro-uridine"
  misc_feature 7: /note="2'-O-Methyluridine"
  misc_feature 8: /note="2'-Fluoro-cytidine"
  misc_feature 9: /note="2'-O-Methyluridine"
  misc_feature 10: /note="2'-fluoroadenosine"
  misc_feature 11: /note="2'-O-Methylguanosine"
  misc_feature 12: /note="2'-Fluoro-guanosine"
  misc_feature 13: /note="2'-O-Methylguanosine"
  misc_feature 14: /note="2'- fluoro-uridine"
  misc_feature 15: /note="2'-O-Methylguanosine"
  misc_feature 16: /note="2'- fluoro-uridine"
  misc_feature 17: /note="2'-O-Methylguanosine"
  misc_feature 18: /note="2'-Fluoro-guanosine"
  misc_feature 19: /note="2'-O-Methylguanosine"
  misc_feature 20: /note="DNA thymine"
  misc_feature 21: /note="DNA thymine"
aaaccuucuagggugugggtt

SEQ ID NO: 74 - RNA, 23 nt, Artificial Sequence
  Synthetic Construct
  misc_feature 1: /note="2'-O-Methylcytidine"
  misc_feature 2: /note="2'-O-Methylcytidine"
  misc_feature 3: /note="2'-O-Methyladenosine"
  misc_feature 4: /note="2'-Fluoro-cytidine"
  misc_feature 5: /note="2'-O-Methylcytidine"
  misc_feature 6: /note="2'-fluoroadenosine"
  misc_feature 7: /note="2'-O-Methylcytidine"
  misc_feature 8: /note="2'-fluoroadenosine"
  misc_feature 9: /note="2'-O-Methylcytidine"
  misc_feature 10: /note="2'-Fluoro-cytidine"
  misc_feature 11: /note="2'-O-Methylcytidine"
  misc_feature 12: /note="2'- fluoro-uridine"
  misc_feature 13: /note="2'-O-Methyladenosine"
  misc_feature 14: /note="2'-Fluoro-guanosine"
  misc_feature 15: /note="2'-O-Methyladenosine"
  misc_feature 16: /note="2'-fluoroadenosine"
  misc_feature 17: /note="2'-O-Methylguanosine"
  misc_feature 18: /note="2'-Fluoro-guanosine"
  misc_feature 19: /note="2'-O-Methyluridine"
  misc_feature 20: /note="2'- fluoro-uridine"
  misc_feature 21: /note="2'-O-Methyluridine"
  misc_feature 22: /note="2'-Fluoro-cytidine"
  misc_feature 23: /note="Inverted DNA thymine"
ccaccacacccuagaagguuuct

SEQ ID NO: 75 - RNA, 21 nt, Artificial Sequence
  Synthetic Construct
  misc_feature 1: /note="2'-Fluoro-guanosine"
  misc_feature 2: /note="2'-fluoroadenosine"
  misc_feature 3: /note="2'-O-Methyladenosine"
  misc_feature 4: /note="2'-fluoroadenosine"
  misc_feature 5: /note="2'-O-Methylcytidine"
  misc_feature 6: /note="2'-Fluoro-cytidine"
  misc_feature 7: /note="2'-O-Methyluridine"
  misc_feature 8: /note="2'- fluoro-uridine"
  misc_feature 9: /note="2'-O-Methylcytidine"
  misc_feature 10: /note="2'- fluoro-uridine"
  misc_feature 11: /note="2'-O-Methyladenosine"
  misc_feature 12: /note="2'-Fluoro-guanosine"
  misc_feature 13: /note="2'-O-Methylguanosine"
  misc_feature 14: /note="2'-Fluoro-guanosine"
  misc_feature 15: /note="2'-O-Methyluridine"
  misc_feature 16: /note="2'-Fluoro-guanosine"
  misc_feature 17: /note="2'-O-Methyluridine"
  misc_feature 18: /note="2'-Fluoro-guanosine"
  misc_feature 19: /note="2'-O-Methylguanosine"
  misc_feature 20: /note="DNA thymine"
  misc_feature 21: /note="DNA thymine"
gaaaccuucuaggguguggtt

SEQ ID NO: 76 - RNA, 23 nt, Artificial Sequence
  Synthetic Construct
  misc_feature 1: /note="2'-O-Methylcytidine"
  misc_feature 2: /note="2'-O-Methylcytidine"
  misc_feature 3: /note="2'-O-Methyladenosine"
  misc_feature 4: /note="2'-Fluoro-cytidine"
  misc_feature 5: /note="2'-O-Methyladenosine"
  misc_feature 6: /note="2'-Fluoro-cytidine"
  misc_feature 7: /note="2'-O-Methyladenosine"
  misc_feature 8: /note="2'-Fluoro-cytidine"
  misc_feature 9: /note="2'-O-Methylcytidine"
  misc_feature 10: /note="2'-Fluoro-cytidine"
  misc_feature 11: /note="2'-O-Methyluridine"
  misc_feature 12: /note="2'-fluoroadenosine"
  misc_feature 13: /note="2'-O-Methylguanosine"
  misc_feature 14: /note="2'-fluoroadenosine"
  misc_feature 15: /note="2'-O-Methyladenosine"
  misc_feature 16: /note="2'-Fluoro-guanosine"
  misc_feature 17: /note="2'-O-Methylguanosine"
  misc_feature 18: /note="2'- fluoro-uridine"
  misc_feature 19: /note="2'-O-Methyluridine"
  misc_feature 20: /note="2'- fluoro-uridine"
  misc_feature 21: /note="2'-O-Methylcytidine"
  misc_feature 22: /note="2'-Fluoro-cytidine"
  misc_feature 23: /note="Inverted DNA thymine"
ccacacacccuagaagguuucct

SEQ ID NO: 77 - RNA, 21 nt, Artificial Sequence
  Synthetic Construct
  misc_feature 1: /note="2'-Fluoro-guanosine"
  misc_feature 2: /note="2'-Fluoro-guanosine"
  misc_feature 3: /note="2'-O-Methyladenosine"
  misc_feature 4: /note="2'-fluoroadenosine"
  misc_feature 5: /note="2'-O-Methyladenosine"
  misc_feature 6: /note="2'-Fluoro-cytidine"
  misc_feature 7: /note="2'-O-Methylcytidine"
  misc_feature 8: /note="2'- fluoro-uridine"
  misc_feature 9: /note="2'-O-Methyluridine"
  misc_feature 10: /note="2'-Fluoro-cytidine"
  misc_feature 11: /note="2'-O-Methyluridine"
  misc_feature 12: /note="2'-fluoroadenosine"
  misc_feature 13: /note="2'-O-Methylguanosine"
  misc_feature 14: /note="2'-Fluoro-guanosine"
  misc_feature 15: /note="2'-O-Methylguanosine"
  misc_feature 16: /note="2'- fluoro-uridine"
  misc_feature 17: /note="2'-O-Methylguanosine"
  misc_feature 18: /note="2'- fluoro-uridine"
  misc_feature 19: /note="2'-O-Methylguanosine"
  misc_feature 20: /note="DNA thymine"
  misc_feature 21: /note="DNA thymine"
ggaaaccuucuagggugugtt

SEQ ID NO: 78 - RNA, 23 nt, Artificial Sequence
  Synthetic Construct
  misc_feature 1: /note="2'-O-Methylcytidine"
  misc_feature 2: /note="2'-O-Methylcytidine"
  misc_feature 3: /note="2'-O-Methyladenosine"
  misc_feature 4: /note="2'-fluoroadenosine"
  misc_feature 5: /note="2'-O-Methylcytidine"
  misc_feature 6: /note="2'-fluoroadenosine"
  misc_feature 7: /note="2'-O-Methylcytidine"
  misc_feature 8: /note="2'-Fluoro-cytidine"
  misc_feature 9: /note="2'-O-Methylcytidine"
  misc_feature 10: /note="2'- fluoro-uridine"
  misc_feature 11: /note="2'-O-Methyladenosine"
  misc_feature 12: /note="2'-Fluoro-guanosine"
  misc_feature 13: /note="2'-O-Methyladenosine"
  misc_feature 14: /note="2'-fluoroadenosine"
  misc_feature 15: /note="2'-O-Methylguanosine"
  misc_feature 16: /note="2'-Fluoro-guanosine"
  misc_feature 17: /note="2'-O-Methyluridine"
  misc_feature 18: /note="2'- fluoro-uridine"
  misc_feature 19: /note="2'-O-Methyluridine"
  misc_feature 20: /note="2'-Fluoro-cytidine"
  misc_feature 21: /note="2'-O-Methylcytidine"
  misc_feature 22: /note="2'-Fluoro-guanosine"
  misc_feature 23: /note="Inverted DNA thymine"
ccaacacccuagaagguuuccgt

SEQ ID NO: 79 - RNA, 21 nt, Artificial Sequence
  Synthetic Construct
  misc_feature 1: /note="2'-Fluoro-cytidine"
  misc_feature 2: /note="2'-Fluoro-guanosine"
  misc_feature 3: /note="2'-O-Methylguanosine"
  misc_feature 4: /note="2'-fluoroadenosine"
  misc_feature 5: /note="2'-O-Methyladenosine"
  misc_feature 6: /note="2'-fluoroadenosine"
  misc_feature 7: /note="2'-O-Methylcytidine"
  misc_feature 8: /note="2'-Fluoro-cytidine"
  misc_feature 9: /note="2'-O-Methyluridine"
  misc_feature 10: /note="2'- fluoro-uridine"
  misc_feature 11: /note="2'-O-Methylcytidine"
  misc_feature 12: /note="2'- fluoro-uridine"
  misc_feature 13: /note="2'-O-Methyladenosine"
  misc_feature 14: /note="2'-Fluoro-guanosine"
  misc_feature 15: /note="2'-O-Methylguanosine"
  misc_feature 17: /note="2'-O-Methyluridine"
  misc_feature 18: /note="2'-Fluoro-guanosine"
  misc_feature 19: /note="2'-O-Methyluridine"
  misc_feature 20: /note="DNA thymine"
  misc_feature 21: /note="DNA thymine"
cggaaaccuucuagggugutt

SEQ ID NO: 80 - RNA, 23 nt, Artificial Sequence
  Synthetic Construct
  misc_feature 1: /note="2'-O-Methylcytidine"
  misc_feature 2: /note="2'-O-Methylcytidine"
  misc_feature 3: /note="2'-O-Methyladenosine"
  misc_feature 4: /note="2'-Fluoro-cytidine"
  misc_feature 5: /note="2'-O-Methyladenosine"
  misc_feature 6: /note="2'-Fluoro-cytidine"
  misc_feature 7: /note="2'-O-Methylcytidine"
  misc_feature 8: /note="2'-Fluoro-cytidine"
  misc_feature 9: /note="2'-O-Methyluridine"
  misc_feature 10: /note="2'-fluoroadenosine"
  misc_feature 11: /note="2'-O-Methylguanosine"
  misc_feature 12: /note="2'-fluoroadenosine"
  misc_feature 13: /note="2'-O-Methyladenosine"
  misc_feature 14: /note="2'-Fluoro-guanosine"
  misc_feature 15: /note="2'-O-Methylguanosine"
  misc_feature 16: /note="2'- fluoro-uridine"
  misc_feature 17: /note="2'-O-Methyluridine"
  misc_feature 18: /note="2'- fluoro-uridine"
  misc_feature 19: /note="2'-O-Methylcytidine"
  misc_feature 20: /note="2'-Fluoro-cytidine"
  misc_feature 21: /note="2'-O-Methylguanosine"
  misc_feature 22: /note="2'-Fluoro-cytidine"
  misc_feature 23: /note="Inverted DNA thymine"
ccacacccuagaagguuuccgct

SEQ ID NO: 81 - RNA, 21 nt, Artificial Sequence
  Synthetic Construct
  misc_feature 1: /note="2'-Fluoro-guanosine"
  misc_feature 2: /note="2'-Fluoro-cytidine"
  misc_feature 3: /note="2'-O-Methylguanosine"
  misc_feature 4: /note="2'-Fluoro-guanosine"
  misc_feature 5: /note="2'-O-Methyladenosine"
  misc_feature 6: /note="2'-fluoroadenosine"
  misc_feature 7: /note="2'-O-Methyladenosine"
  misc_feature 8: /note="2'-Fluoro-cytidine"
  misc_feature 9: /note="2'-O-Methylcytidine"
  misc_feature 10: /note="2'- fluoro-uridine"
  misc_feature 11: /note="2'-O-Methyluridine"
  misc_feature 12: /note="2'-Fluoro-cytidine"
  misc_feature 13: /note="2'-O-Methyluridine"
  misc_feature 14: /note="2'-fluoroadenosine"
  misc_feature 15: /note="2'-O-Methylguanosine"
  misc_feature 16: /note="2'-Fluoro-guanosine"
  misc_feature 17: /note="2'-O-Methylguanosine"
  misc_feature 18: /note="2'- fluoro-uridine"
  misc_feature 19: /note="2'-O-Methylguanosine"
  misc_feature 20: /note="DNA thymine"
  misc_feature 21: /note="DNA thymine"
gcggaaaccuucuagggugtt

SEQ ID NO: 82 - RNA, 23 nt, Artificial Sequence
  Synthetic Construct
  misc_feature 1: /note="2'-O-Methylcytidine"
  misc_feature 2: /note="2'-O-Methylcytidine"
  misc_feature 3: /note="2'-O-Methyladenosine"
  misc_feature 4: /note="2'-fluoroadenosine"
  misc_feature 5: /note="2'-O-Methylcytidine"
  misc_feature 6: /note="2'-Fluoro-cytidine"
  misc_feature 7: /note="2'-O-Methylcytidine"
  misc_feature 8: /note="2'- fluoro-uridine"
  misc_feature 9: /note="2'-O-Methyladenosine"
  misc_feature 10: /note="2'-Fluoro-guanosine"
  misc_feature 11: /note="2'-O-Methyladenosine"
  misc_feature 12: /note="2'-fluoroadenosine"
  misc_feature 13: /note="2'-O-Methylguanosine"
  misc_feature 14: /note="2'-Fluoro-guanosine"
  misc_feature 15: /note="2'-O-Methyluridine"
  misc_feature 16: /note="2'- fluoro-uridine"
  misc_feature 17: /note="2'-O-Methyluridine"
  misc_feature 18: /note="2'-Fluoro-cytidine"
  misc_feature 19: /note="2'-O-Methylcytidine"
  misc_feature 20: /note="2'-Fluoro-guanosine"
  misc_feature 21: /note="2'-O-Methylcytidine"
  misc_feature 22: /note="2'-fluoroadenosine"
  misc_feature 23: /note="Inverted DNA thymine"
ccaacccuagaagguuuccgcat

SEQ ID NO: 83 - RNA, 21 nt, Artificial Sequence
  Synthetic Construct
  misc_feature 1: /note="2'- fluoro-uridine"
  misc_feature 2: /note="2'-Fluoro-guanosine"
  misc_feature 3: /note="2'-O-Methylcytidine"
  misc_feature 4: /note="2'-Fluoro-guanosine"
  misc_feature 5: /note="2'-O-Methylguanosine"
  misc_feature 6: /note="2'-fluoroadenosine"
  misc_feature 7: /note="2'-O-Methyladenosine"
  misc_feature 8: /note="2'-fluoroadenosine"
  misc_feature 9: /note="2'-O-Methylcytidine"
  misc_feature 10: /note="2'-Fluoro-cytidine"
  misc_feature 11: /note="2'-O-Methyluridine"
  misc_feature 12: /note="2'- fluoro-uridine"
  misc_feature 13: /note="2'-O-Methylcytidine"
  misc_feature 14: /note="2'- fluoro-uridine"
  misc_feature 15: /note="2'-O-Methyladenosine"
  misc_feature 16: /note="2'-Fluoro-guanosine"
  misc_feature 17: /note="2'-O-Methylguanosine"
  misc_feature 18: /note="2'-Fluoro-guanosine"
  misc_feature 19: /note="2'-O-Methyluridine"
  misc_feature 20: /note="DNA thymine"
  misc_feature 21: /note="DNA thymine"
ugcggaaaccuucuagggutt

SEQ ID NO: 84 - RNA, 23 nt, Artificial Sequence
  Synthetic Construct
  misc_feature 1: /note="2'-O-Methylcytidine"
  misc_feature 2: /note="2'-O-Methylcytidine"
  misc_feature 3: /note="2'-O-Methyladenosine"
  misc_feature 4: /note="2'-Fluoro-cytidine"
  misc_feature 5: /note="2'-O-Methylcytidine"
  misc_feature 6: /note="2'-Fluoro-cytidine"
  misc_feature 7: /note="2'-O-Methyluridine"
  misc_feature 8: /note="2'-fluoroadenosine"
  misc_feature 9: /note="2'-O-Methylguanosine"
  misc_feature 10: /note="2'-fluoroadenosine"
  misc_feature 11: /note="2'-O-Methyladenosine"
  misc_feature 12: /note="2'-Fluoro-guanosine"
  misc_feature 13: /note="2'-O-Methylguanosine"
  misc_feature 14: /note="2'- fluoro-uridine"
  misc_feature 15: /note="2'-O-Methyluridine"
  misc_feature 16: /note="2'- fluoro-uridine"
  misc_feature 17: /note="2'-O-Methylcytidine"
  misc_feature 18: /note="2'-Fluoro-cytidine"
  misc_feature 19: /note="2'-O-Methylguanosine"
  misc_feature 20: /note="2'-Fluoro-cytidine"
  misc_feature 21: /note="2'-O-Methyladenosine"
  misc_feature 22: /note="2'-Fluoro-guanosine"
  misc_feature 23: /note="Inverted DNA thymine"
ccacccuagaagguuuccgcagt

SEQ ID NO: 85 - RNA, 21 nt, Artificial Sequence
  Synthetic Construct
  misc_feature 1: /note="2'-Fluoro-cytidine"
  misc_feature 2: /note="2'- fluoro-uridine"
  misc_feature 3: /note="2'-O-Methylguanosine"
  misc_feature 4: /note="2'-Fluoro-cytidine"
  misc_feature 5: /note="2'-O-Methylguanosine"
  misc_feature 6: /note="2'-Fluoro-guanosine"
  misc_feature 7: /note="2'-O-Methyladenosine"
  misc_feature 8: /note="2'-fluoroadenosine"
  misc_feature 9: /note="2'-O-Methyladenosine"
  misc_feature 10: /note="2'-Fluoro-cytidine"
  misc_feature 11: /note="2'-O-Methylcytidine"
  misc_feature 12: /note="2'- fluoro-uridine"
  misc_feature 13: /note="2'-O-Methyluridine"
  misc_feature 14: /note="2'-Fluoro-cytidine"
  misc_feature 15: /note="2'-O-Methyluridine"
  misc_feature 16: /note="2'-fluoroadenosine"
  misc_feature 17: /note="2'-O-Methylguanosine"
  misc_feature 18: /note="2'-Fluoro-guanosine"
  misc_feature 19: /note="2'-O-Methylguanosine"
  misc_feature 20: /note="DNA thymine"
  misc_feature 21: /note="DNA thymine"
cugcggaaaccuucuagggtt

SEQ ID NO: 86 - RNA, 23 nt, Artificial Sequence
  Synthetic Construct
  misc_feature 1: /note="2'-O-Methylcytidine"
  misc_feature 2: /note="2'-O-Methylcytidine"
  misc_feature 3: /note="2'-O-Methyladenosine"
  misc_feature 4: /note="2'-Fluoro-cytidine"
  misc_feature 5: /note="2'-O-Methylcytidine"
  misc_feature 6: /note="2'- fluoro-uridine"
  misc_feature 7: /note="2'-O-Methyladenosine"
  misc_feature 8: /note="2'-Fluoro-guanosine"
  misc_feature 9: /note="2'-O-Methyladenosine"
  misc_feature 10: /note="2'-fluoroadenosine"
  misc_feature 11: /note="2'-O-Methylguanosine"
  misc_feature 12: /note="2'-Fluoro-guanosine"
  misc_feature 13: /note="2'-O-Methyluridine"
  misc_feature 14: /note="2'- fluoro-uridine"
  misc_feature 15: /note="2'-O-Methyluridine"
  misc_feature 16: /note="2'-Fluoro-cytidine"
  misc_feature 17: /note="2'-O-Methylcytidine"
  misc_feature 18: /note="2'-Fluoro-guanosine"
  misc_feature 19: /note="2'-O-Methylcytidine"
  misc_feature 20: /note="2'-fluoroadenosine"
  misc_feature 21: /note="2'-O-Methylguanosine"
  misc_feature 22: /note="2'-Fluoro-cytidine"
  misc_feature 23: /note="Inverted DNA thymine"
ccaccuagaagguuuccgcagct

SEQ ID NO: 87 - RNA, 21 nt, Artificial Sequence
  Synthetic Construct
  misc_feature 1: /note="2'-Fluoro-guanosine"
  misc_feature 2: /note="2'-Fluoro-cytidine"
  misc_feature 3: /note="2'-O-Methyluridine"
  misc_feature 4: /note="2'-Fluoro-guanosine"
  misc_feature 5: /note="2'-O-Methylcytidine"
  misc_feature 6: /note="2'-Fluoro-guanosine"
  misc_feature 7: /note="2'-O-Methylguanosine"
  misc_feature 8: /note="2'-fluoroadenosine"
  misc_feature 9: /note="2'-O-Methyladenosine"
  misc_feature 10: /note="2'-fluoroadenosine"
  misc_feature 11: /note="2'-O-Methylcytidine"
  misc_feature 12: /note="2'-Fluoro-cytidine"
  misc_feature 13: /note="2'-O-Methyluridine"
  misc_feature 14: /note="2'- fluoro-uridine"
  misc_feature 15: /note="2'-O-Methylcytidine"
  misc_feature 16: /note="2'- fluoro-uridine"
  misc_feature 17: /note="2'-O-Methyladenosine"
  misc_feature 18: /note="2'-Fluoro-guanosine"
  misc_feature 19: /note="2'-O-Methylguanosine"
  misc_feature 20: /note="DNA thymine"
  misc_feature 21: /note="DNA thymine"
gcugcggaaaccuucuaggtt

SEQ ID NO: 88 - RNA, 23 nt, Artificial Sequence
  Synthetic Construct
  misc_feature 1: /note="2'-O-Methylcytidine"
  misc_feature 2: /note="2'-O-Methylcytidine"
  misc_feature 3: /note="2'-O-Methyladenosine"
  misc_feature 4: /note="2'-Fluoro-cytidine"
  misc_feature 5: /note="2'-O-Methyluridine"
  misc_feature 6: /note="2'-fluoroadenosine"
  misc_feature 7: /note="2'-O-Methylguanosine"
  misc_feature 8: /note="2'-fluoroadenosine"
  misc_feature 9: /note="2'-O-Methyladenosine"
  misc_feature 10: /note="2'-Fluoro-guanosine"
  misc_feature 11: /note="2'-O-Methylguanosine"
  misc_feature 12: /note="2'- fluoro-uridine"
  misc_feature 13: /note="2'-O-Methyluridine"
  misc_feature 14: /note="2'- fluoro-uridine"
  misc_feature 15: /note="2'-O-Methylcytidine"
  misc_feature 16: /note="2'-Fluoro-cytidine"
  misc_feature 17: /note="2'-O-Methylguanosine"
  misc_feature 18: /note="2'-Fluoro-cytidine"
  misc_feature 19: /note="2'-O-Methyladenosine"
  misc_feature 20: /note="2'-Fluoro-guanosine"
  misc_feature 21: /note="2'-O-Methylcytidine"
  misc_feature 22: /note="2'-Fluoro-guanosine"
  misc_feature 23: /note="Inverted DNA thymine"
ccacuagaagguuuccgcagcgt

SEQ ID NO: 89 - RNA, 21 nt, Artificial Sequence
  Synthetic Construct
  misc_feature 1: /note="2'-Fluoro-cytidine"
  misc_feature 2: /note="2'-Fluoro-guanosine"
  misc_feature 3: /note="2'-O-Methylcytidine"
  misc_feature 4: /note="2'- fluoro-uridine"
  misc_feature 5: /note="2'-O-Methylguanosine"
  misc_feature 6: /note="2'-Fluoro-cytidine"
  misc_feature 7: /note="2'-O-Methylguanosine"
  misc_feature 8: /note="2'-Fluoro-guanosine"
  misc_feature 9: /note="2'-O-Methyladenosine"
  misc_feature 10: /note="2'-fluoroadenosine"
  misc_feature 11: /note="2'-O-Methyladenosine"
  misc_feature 12: /note="2'-Fluoro-cytidine"
  misc_feature 13: /note="2'-O-Methylcytidine"
  misc_feature 14: /note="2'- fluoro-uridine"
  misc_feature 15: /note="2'-O-Methyluridine"
  misc_feature 16: /note="2'-Fluoro-cytidine"
  misc_feature 17: /note="2'-O-Methyluridine"
  misc_feature 18: /note="2'-fluoroadenosine"
  misc_feature 19: /note="2'-O-Methylguanosine"
  misc_feature 20: /note="DNA thymine"
  misc_feature 21: /note="DNA thymine"
cgcugcggaaaccuucuagtt

SEQ ID NO: 90 - RNA, 23 nt, Artificial Sequence
  Synthetic Construct
  misc_feature 1: /note="2'-O-Methylcytidine"
  misc_feature 2: /note="2'-O-Methylcytidine"
  misc_feature 3: /note="2'-O-Methyladenosine"
  misc_feature 4: /note="2'- fluoro-uridine"
  misc_feature 5: /note="2'-O-Methyladenosine"
  misc_feature 6: /note="2'-Fluoro-guanosine"
  misc_feature 7: /note="2'-O-Methyladenosine"
  misc_feature 8: /note="2'-fluoroadenosine"
  misc_feature 9: /note="2'-O-Methylguanosine"
  misc_feature 10: /note="2'-Fluoro-guanosine"
  misc_feature 11: /note="2'-O-Methyluridine"
  misc_feature 12: /note="2'- fluoro-uridine"
  misc_feature 13: /note="2'-O-Methyluridine"
  misc_feature 14: /note="2'-Fluoro-cytidine"
  misc_feature 15: /note="2'-O-Methylcytidine"
  misc_feature 16: /note="2'-Fluoro-guanosine"
  misc_feature 17: /note="2'-O-Methylcytidine"
  misc_feature 18: /note="2'-fluoroadenosine"
  misc_feature 19: /note="2'-O-Methylguanosine"
  misc_feature 20: /note="2'-Fluoro-cytidine"
  misc_feature 21: /note="2'-O-Methylguanosine"
  misc_feature 22: /note="2'-fluoroadenosine"
  misc_feature 23: /note="Inverted DNA thymine"
ccauagaagguuuccgcagcgat

SEQ ID NO: 91 - RNA, 21 nt, Artificial Sequence
  Synthetic Construct
  misc_feature 1: /note="2'- fluoro-uridine"
  misc_feature 2: /note="2'-Fluoro-cytidine"
  misc_feature 3: /note="2'-O-Methylguanosine"
  misc_feature 4: /note="2'-Fluoro-cytidine"
  misc_feature 5: /note="2'-O-Methyluridine"
  misc_feature 6: /note="2'-Fluoro-guanosine"
  misc_feature 7: /note="2'-O-Methylcytidine"
  misc_feature 8: /note="2'-Fluoro-guanosine"
  misc_feature 9: /note="2'-O-Methylguanosine"
  misc_feature 10: /note="2'-fluoroadenosine"
  misc_feature 11: /note="2'-O-Methyladenosine"
  misc_feature 12: /note="2'-fluoroadenosine"
  misc_feature 13: /note="2'-O-Methylcytidine"
  misc_feature 14: /note="2'-Fluoro-cytidine"
  misc_feature 15: /note="2'-O-Methyluridine"
  misc_feature 16: /note="2'- fluoro-uridine"
  misc_feature 17: /note="2'-O-Methylcytidine"
  misc_feature 18: /note="2'- fluoro-uridine"
  misc_feature 19: /note="2'-O-Methyladenosine"
  misc_feature 20: /note="DNA thymine"
  misc_feature 21: /note="DNA thymine"
ucgcugcggaaaccuucuatt

SEQ ID NO: 92 - RNA, 23 nt, Artificial Sequence
  Synthetic Construct
  misc_feature 1: /note="2'-O-Methylcytidine"
  misc_feature 2: /note="2'-O-Methylcytidine"
  misc_feature 3: /note="2'-O-Methyladenosine"
  misc_feature 4: /note="2'-fluoroadenosine"
  misc_feature 5: /note="2'-O-Methylguanosine"
  misc_feature 6: /note="2'-fluoroadenosine"
  misc_feature 7: /note="2'-O-Methyladenosine"
  misc_feature 8: /note="2'-Fluoro-guanosine"
  misc_feature 9: /note="2'-O-Methylguanosine"
  misc_feature 10: /note="2'- fluoro-uridine"
  misc_feature 11: /note="2'-O-Methyluridine"
  misc_feature 12: /note="2'- fluoro-uridine"
  misc_feature 13: /note="2'-O-Methylcytidine"
  misc_feature 14: /note="2'-Fluoro-cytidine"
  misc_feature 15: /note="2'-O-Methylguanosine"
  misc_feature 16: /note="2'-Fluoro-cytidine"
  misc_feature 17: /note="2'-O-Methyladenosine"
  misc_feature 18: /note="2'-Fluoro-guanosine"
  misc_feature 19: /note="2'-O-Methylcytidine"
  misc_feature 20: /note="2'-Fluoro-guanosine"
  misc_feature 21: /note="2'-O-Methyladenosine"
  misc_feature 23: /note="Inverted DNA thymine"
ccaagaagguuuccgcagcgact

SEQ ID NO: 93 - RNA, 21 nt, Artificial Sequence
  Synthetic Construct
  misc_feature 1: /note="2'-Fluoro-guanosine"
  misc_feature 2: /note="2'- fluoro-uridine"
  misc_feature 3: /note="2'-O-Methylcytidine"
  misc_feature 4: /note="2'-Fluoro-guanosine"
  misc_feature 5: /note="2'-O-Methylcytidine"
  misc_feature 6: /note="2'- fluoro-uridine"
  misc_feature 7: /note="2'-O-Methylguanosine"
  misc_feature 8: /note="2'-Fluoro-cytidine"
  misc_feature 9: /note="2'-O-Methylguanosine"
  misc_feature 10: /note="2'-Fluoro-guanosine"
  misc_feature 11: /note="2'-O-Methyladenosine"
  misc_feature 12: /note="2'-fluoroadenosine"
  misc_feature 13: /note="2'-O-Methyladenosine"
  misc_feature 14: /note="2'-Fluoro-cytidine"
  misc_feature 15: /note="2'-O-Methylcytidine"
  misc_feature 16: /note="2'- fluoro-uridine"
  misc_feature 17: /note="2'-O-Methyluridine"
  misc_feature 18: /note="2'-Fluoro-cytidine"
  misc_feature 19: /note="2'-O-Methyluridine"
  misc_feature 20: /note="DNA thymine"
  misc_feature 21: /note="DNA thymine"
gucgcugcggaaaccuucutt

SEQ ID NO: 94 - RNA, 23 nt, Artificial Sequence
  Synthetic Construct
  misc_feature 1: /note="2'-O-Methylcytidine"
  misc_feature 2: /note="2'-O-Methylcytidine"
  misc_feature 3: /note="2'-O-Methyladenosine"
  misc_feature 4: /note="2'-Fluoro-guanosine"
  misc_feature 5: /note="2'-O-Methyladenosine"
  misc_feature 6: /note="2'-fluoroadenosine"
  misc_feature 7: /note="2'-O-Methylguanosine"
  misc_feature 8: /note="2'-Fluoro-guanosine"
  misc_feature 9: /note="2'-O-Methyluridine"
  misc_feature 10: /note="2'- fluoro-uridine"
  misc_feature 11: /note="2'-O-Methyluridine"
  misc_feature 12: /note="2'-Fluoro-cytidine"
  misc_feature 13: /note="2'-O-Methylcytidine"
  misc_feature 14: /note="2'-Fluoro-guanosine"
  misc_feature 15: /note="2'-O-Methylcytidine"
  misc_feature 16: /note="2'-fluoroadenosine"
  misc_feature 17: /note="2'-O-Methylguanosine"
  misc_feature 18: /note="2'-Fluoro-cytidine"
  misc_feature 19: /note="2'-O-Methylguanosine"
  misc_feature 20: /note="2'-fluoroadenosine"
  misc_feature 21: /note="2'-O-Methylcytidine"
  misc_feature 22: /note="2'-Fluoro-guanosine"
  misc_feature 23: /note="Inverted DNA thymine"
ccagaagguuuccgcagcgacgt

SEQ ID NO: 95 - RNA, 21 nt, Artificial Sequence
  Synthetic Construct
  misc_feature 1: /note="2'-Fluoro-cytidine"
  misc_feature 2: /note="2'-Fluoro-guanosine"
  misc_feature 3: /note="2'-O-Methyluridine"
  misc_feature 4: /note="2'-Fluoro-cytidine"
  misc_feature 5: /note="2'-O-Methylguanosine"
  misc_feature 6: /note="2'-Fluoro-cytidine"
  misc_feature 7: /note="2'-O-Methyluridine"
  misc_feature 8: /note="2'-Fluoro-guanosine"
  misc_feature 9: /note="2'-O-Methylcytidine"
  misc_feature 10: /note="2'-Fluoro-guanosine"
  misc_feature 11: /note="2'-O-Methylguanosine"
  misc_feature 12: /note="2'-fluoroadenosine"
  misc_feature 13: /note="2'-O-Methyladenosine"
  misc_feature 14: /note="2'-fluoroadenosine"
  misc_feature 15: /note="2'-O-Methylcytidine"
  misc_feature 16: /note="2'-Fluoro-cytidine"
  misc_feature 17: /note="2'-O-Methyluridine"
  misc_feature 18: /note="2'- fluoro-uridine"
  misc_feature 19: /note="2'-O-Methylcytidine"
  misc_feature 20: /note="DNA thymine"
  misc_feature 21: /note="DNA thymine"
cgucgcugcggaaaccuuctt

SEQ ID NO: 96 - RNA, 23 nt, Artificial Sequence
  Synthetic Construct
  misc_feature 1: /note="2'-O-Methylcytidine"
  misc_feature 2: /note="2'-O-Methylcytidine"
  misc_feature 3: /note="2'-O-Methyladenosine"
  misc_feature 4: /note="2'-fluoroadenosine"
  misc_feature 5: /note="2'-O-Methyladenosine"
  misc_feature 6: /note="2'-Fluoro-guanosine"
  misc_feature 7: /note="2'-O-Methylguanosine"
  misc_feature 8: /note="2'- fluoro-uridine"
  misc_feature 9: /note="2'-O-Methyluridine"
  misc_feature 10: /note="2'- fluoro-uridine"
  misc_feature 11: /note="2'-O-Methylcytidine"
  misc_feature 12: /note="2'-Fluoro-cytidine"
  misc_feature 13: /note="2'-O-Methylguanosine"
  misc_feature 14: /note="2'-Fluoro-cytidine"
  misc_feature 15: /note="2'-O-Methyladenosine"
  misc_feature 16: /note="2'-Fluoro-guanosine"
  misc_feature 17: /note="2'-O-Methylcytidine"
  misc_feature 18: /note="2'-Fluoro-guanosine"
  misc_feature 19: /note="2'-O-Methyladenosine"
  misc_feature 20: /note="2'-Fluoro-cytidine"
  misc_feature 21: /note="2'-O-Methylguanosine"
  misc_feature 22: /note="2'- fluoro-uridine"
  misc_feature 23: /note="Inverted DNA thymine"
ccaaagguuuccgcagcgacgut

SEQ ID NO: 97 - RNA, 21 nt, Artificial Sequence
  Synthetic Construct
  misc_feature 1: /note="2'-fluoroadenosine"
  misc_feature 2: /note="2'-Fluoro-cytidine"
  misc_feature 3: /note="2'-O-Methylguanosine"
  misc_feature 4: /note="2'- fluoro-uridine"
  misc_feature 5: /note="2'-O-Methylcytidine"
  misc_feature 6: /note="2'-Fluoro-guanosine"
  misc_feature 7: /note="2'-O-Methylcytidine"
  misc_feature 8: /note="2'- fluoro-uridine"
  misc_feature 9: /note="2'-O-Methylguanosine"
  misc_feature 10: /note="2'-Fluoro-cytidine"
  misc_feature 11: /note="2'-O-Methylguanosine"
  misc_feature 12: /note="2'-Fluoro-guanosine"
  misc_feature 13: /note="2'-O-Methyladenosine"
  misc_feature 14: /note="2'-fluoroadenosine"
  misc_feature 15: /note="2'-O-Methyladenosine"
  misc_feature 16: /note="2'-Fluoro-cytidine"
  misc_feature 17: /note="2'-O-Methylcytidine"
  misc_feature 18: /note="2'- fluoro-uridine"
  misc_feature 19: /note="2'-O-Methyluridine"
  misc_feature 20: /note="DNA thymine"
  misc_feature 21: /note="DNA thymine"
acgucgcugcggaaaccuutt

SEQ ID NO: 98 - RNA, 23 nt, Artificial Sequence
  Synthetic Construct
  misc_feature 1: /note="2'-O-Methylcytidine"
  misc_feature 2: /note="2'-O-Methylcytidine"
  misc_feature 3: /note="2'-O-Methyladenosine"
  misc_feature 4: /note="2'-fluoroadenosine"
  misc_feature 5: /note="2'-O-Methylguanosine"
  misc_feature 6: /note="2'-Fluoro-guanosine"
  misc_feature 7: /note="2'-O-Methyluridine"
  misc_feature 8: /note="2'- fluoro-uridine"
  misc_feature 9: /note="2'-O-Methyluridine"
  misc_feature 10: /note="2'-Fluoro-cytidine"
  misc_feature 11: /note="2'-O-Methylcytidine"
  misc_feature 12: /note="2'-Fluoro-guanosine"
  misc_feature 13: /note="2'-O-Methylcytidine"
  misc_feature 14: /note="2'-fluoroadenosine"
  misc_feature 15: /note="2'-O-Methylguanosine"
  misc_feature 16: /note="2'-Fluoro-cytidine"
  misc_feature 17: /note="2'-O-Methylguanosine"
  misc_feature 18: /note="2'-fluoroadenosine"
  misc_feature 19: /note="2'-O-Methylcytidine"
  misc_feature 20: /note="2'-Fluoro-guanosine"
  misc_feature 21: /note="2'-O-Methyluridine"
  misc_feature 22: /note="2'-Fluoro-cytidine"
  misc_feature 23: /note="Inverted DNA thymine"
ccaagguuuccgcagcgacguct

SEQ ID NO: 99 - RNA, 21 nt, Artificial Sequence
  Synthetic Construct
  misc_feature 1: /note="2'-Fluoro-guanosine"
  misc_feature 2: /note="2'-fluoroadenosine"
  misc_feature 3: /note="2'-O-Methylcytidine"
  misc_feature 4: /note="2'-Fluoro-guanosine"
  misc_feature 5: /note="2'-O-Methyluridine"
  misc_feature 6: /note="2'-Fluoro-cytidine"
  misc_feature 7: /note="2'-O-Methylguanosine"
  misc_feature 8: /note="2'-Fluoro-cytidine"
  misc_feature 9: /note="2'-O-Methyluridine"
  misc_feature 10: /note="2'-Fluoro-guanosine"
  misc_feature 11: /note="2'-O-Methylcytidine"
  misc_feature 12: /note="2'-Fluoro-guanosine"
  misc_feature 13: /note="2'-O-Methylguanosine"
  misc_feature 14: /note="2'-fluoroadenosine"
  misc_feature 15: /note="2'-O-Methyladenosine"
  misc_feature 16: /note="2'-fluoroadenosine"
  misc_feature 17: /note="2'-O-Methylcytidine"
  misc_feature 18: /note="2'-Fluoro-cytidine"
  misc_feature 19: /note="2'-O-Methyluridine"
  misc_feature 20: /note="DNA thymine"
  misc_feature 21: /note="DNA thymine"
gacgucgcugcggaaaccutt

SEQ ID NO: 100 - RNA, 23 nt, Artificial Sequence
  Synthetic Construct
  misc_feature 1: /note="2'-O-Methylcytidine"
  misc_feature 2: /note="2'-O-Methylcytidine"
  misc_feature 3: /note="2'-O-Methyladenosine"
  misc_feature 4: /note="2'-Fluoro-guanosine"
  misc_feature 5: /note="2'-O-Methyluridine"
  misc_feature 6: /note="2'- fluoro-uridine"
  misc_feature 7: /note="2'-O-Methyluridine"
  misc_feature 8: /note="2'-Fluoro-cytidine"
  misc_feature 9: /note="2'-O-Methylcytidine"
  misc_feature 10: /note="2'-Fluoro-guanosine"
  misc_feature 11: /note="2'-O-Methylcytidine"
  misc_feature 12: /note="2'-fluoroadenosine"
  misc_feature 13: /note="2'-O-Methylguanosine"
  misc_feature 14: /note="2'-Fluoro-cytidine"
  misc_feature 15: /note="2'-O-Methylguanosine"
  misc_feature 16: /note="2'-fluoroadenosine"
  misc_feature 17: /note="2'-O-Methylcytidine"
  misc_feature 18: /note="2'-Fluoro-guanosine"
  misc_feature 19: /note="2'-O-Methyluridine"
  misc_feature 20: /note="2'-Fluoro-cytidine"
  misc_feature 21: /note="2'-O-Methylguanosine"
  misc_feature 22: /note="2'-fluoroadenosine"
  misc_feature 23: /note="Inverted DNA thymine"
ccaguuuccgcagcgacgucgat

SEQ ID NO: 101 - RNA, 21 nt, Artificial Sequence
  Synthetic Construct
  misc_feature 1: /note="2'- fluoro-uridine"
  misc_feature 2: /note="2'-Fluoro-cytidine"
  misc_feature 3: /note="2'-O-Methylguanosine"
  misc_feature 4: /note="2'-fluoroadenosine"
  misc_feature 5: /note="2'-O-Methylcytidine"
  misc_feature 6: /note="2'-Fluoro-guanosine"
  misc_feature 7: /note="2'-O-Methyluridine"
  misc_feature 8: /note="2'-Fluoro-cytidine"
  misc_feature 9: /note="2'-O-Methylguanosine"
  misc_feature 10: /note="2'-Fluoro-cytidine"
  misc_feature 11: /note="2'-O-Methyluridine"
  misc_feature 12: /note="2'-Fluoro-guanosine"
  misc_feature 13: /note="2'-O-Methylcytidine"
  misc_feature 14: /note="2'-Fluoro-guanosine"
  misc_feature 15: /note="2'-O-Methylguanosine"
  misc_feature 16: /note="2'-fluoroadenosine"
  misc_feature 17: /note="2'-O-Methyladenosine"
  misc_feature 18: /note="2'-fluoroadenosine"
  misc_feature 19: /note="2'-O-Methylcytidine"
  misc_feature 20: /note="DNA thymine"
  misc_feature 21: /note="DNA thymine"
ucgacgucgcugcggaaactt

SEQ ID NO: 102 - RNA, 23 nt, Artificial Sequence
  Synthetic Construct
  misc_feature 1: /note="2'-O-Methylcytidine"
  misc_feature 2: /note="2'-O-Methylcytidine"
  misc_feature 3: /note="2'-O-Methyladenosine"
  misc_feature 4: /note="2'- fluoro-uridine"
  misc_feature 5: /note="2'-O-Methyluridine"
  misc_feature 6: /note="2'- fluoro-uridine"
  misc_feature 7: /note="2'-O-Methylcytidine"
  misc_feature 8: /note="2'-Fluoro-cytidine"
  misc_feature 9: /note="2'-O-Methylguanosine"
  misc_feature 10: /note="2'-Fluoro-cytidine"
  misc_feature 11: /note="2'-O-Methyladenosine"
  misc_feature 12: /note="2'-Fluoro-guanosine"
  misc_feature 13: /note="2'-O-Methylcytidine"
  misc_feature 14: /note="2'-Fluoro-guanosine"
  misc_feature 15: /note="2'-O-Methyladenosine"
  misc_feature 16: /note="2'-Fluoro-cytidine"
  misc_feature 17: /note="2'-O-Methylguanosine"
  misc_feature 18: /note="2'- fluoro-uridine"
  misc_feature 19: /note="2'-O-Methylcytidine"
  misc_feature 20: /note="2'-Fluoro-guanosine"
  misc_feature 21: /note="2'-O-Methyladenosine"
  misc_feature 22: /note="2'-Fluoro-guanosine"
  misc_feature 23: /note="Inverted DNA thymine"
ccauuuccgcagcgacgucgagt

SEQ ID NO: 103 - RNA, 21 nt, Artificial Sequence
  Synthetic Construct
  misc_feature 1: /note="2'-Fluoro-cytidine"
  misc_feature 2: /note="2'- fluoro-uridine"
  misc_feature 3: /note="2'-O-Methylcytidine"
  misc_feature 4: /note="2'-Fluoro-guanosine"
  misc_feature 5: /note="2'-O-Methyladenosine"
  misc_feature 6: /note="2'-Fluoro-cytidine"
  misc_feature 7: /note="2'-O-Methylguanosine"
  misc_feature 8: /note="2'- fluoro-uridine"
  misc_feature 9: /note="2'-O-Methylcytidine"
  misc_feature 10: /note="2'-Fluoro-guanosine"
  misc_feature 11: /note="2'-O-Methylcytidine"
  misc_feature 12: /note="2'- fluoro-uridine"
  misc_feature 13: /note="2'-O-Methylguanosine"
  misc_feature 14: /note="2'-Fluoro-cytidine"
  misc_feature 15: /note="2'-O-Methylguanosine"
  misc_feature 16: /note="2'-Fluoro-guanosine"
  misc_feature 17: /note="2'-O-Methyladenosine"
  misc_feature 18: /note="2'-fluoroadenosine"
  misc_feature 19: /note="2'-O-Methyladenosine"
  misc_feature 20: /note="DNA thymine"
  misc_feature 21: /note="DNA thymine"
cucgacgucgcugcggaaatt

SEQ ID NO: 104 - RNA, 23 nt, Artificial Sequence
  Synthetic Construct
  misc_feature 1: /note="2'-O-Methylcytidine"
  misc_feature 2: /note="2'-O-Methylcytidine"
  misc_feature 3: /note="2'-O-Methyladenosine"
  misc_feature 4: /note="2'-Fluoro-cytidine"
  misc_feature 5: /note="2'-O-Methylcytidine"
  misc_feature 6: /note="2'- fluoro-uridine"
  misc_feature 7: /note="2'-O-Methylguanosine"
  misc_feature 8: /note="2'-fluoroadenosine"
  misc_feature 9: /note="2'-O-Methyladenosine"
  misc_feature 10: /note="2'-Fluoro-cytidine"
  misc_feature 11: /note="2'-O-Methyluridine"
  misc_feature 12: /note="2'- fluoro-uridine"
  misc_feature 13: /note="2'-O-Methylcytidine"
  misc_feature 14: /note="2'-fluoroadenosine"
  misc_feature 15: /note="2'-O-Methylguanosine"
  misc_feature 16: /note="2'-Fluoro-cytidine"
  misc_feature 17: /note="2'-O-Methyluridine"
  misc_feature 18: /note="2'-Fluoro-cytidine"
  misc_feature 19: /note="2'-O-Methylcytidine"
  misc_feature 20: /note="2'- fluoro-uridine"
  misc_feature 21: /note="2'-O-Methylguanosine"
  misc_feature 22: /note="2'-Fluoro-cytidine"
  misc_feature 23: /note="Inverted DNA thymine"
ccaccugaacuucagcuccugct

SEQ ID NO: 105 - RNA, 21 nt, Artificial Sequence
  Synthetic Construct
  misc_feature 1: /note="2'-Fluoro-guanosine"
  misc_feature 2: /note="2'-Fluoro-cytidine"
  misc_feature 3: /note="2'-O-Methyladenosine"
  misc_feature 4: /note="2'-Fluoro-guanosine"
  misc_feature 5: /note="2'-O-Methylguanosine"
  misc_feature 6: /note="2'-fluoroadenosine"
  misc_feature 7: /note="2'-O-Methylguanosine"
  misc_feature 8: /note="2'-Fluoro-cytidine"
  misc_feature 9: /note="2'-O-Methyluridine"
  misc_feature 10: /note="2'-Fluoro-guanosine"
  misc_feature 11: /note="2'-O-Methyladenosine"
  misc_feature 12: /note="2'-fluoroadenosine"
  misc_feature 13: /note="2'-O-Methylguanosine"
  misc_feature 14: /note="2'- fluoro-uridine"
  misc_feature 15: /note="2'-O-Methyluridine"
  misc_feature 16: /note="2'-Fluoro-cytidine"
  misc_feature 17: /note="2'-O-Methyladenosine"
  misc_feature 18: /note="2'-Fluoro-guanosine"
  misc_feature 19: /note="2'-O-Methylguanosine"
  misc_feature 20: /note="DNA thymine"
  misc_feature 21: /note="DNA thymine"
gcaggagcugaaguucaggtt

SEQ ID NO: 106 - RNA, 23 nt, Artificial Sequence
  Synthetic Construct
  misc_feature 1: /note="2'-O-Methylcytidine"
  misc_feature 2: /note="2'-O-Methylcytidine"
  misc_feature 3: /note="2'-O-Methyladenosine"
  misc_feature 4: /note="2'-Fluoro-cytidine"
  misc_feature 5: /note="2'-O-Methyluridine"
  misc_feature 6: /note="2'-Fluoro-guanosine"
  misc_feature 7: /note="2'-O-Methyladenosine"
  misc_feature 8: /note="2'-fluoroadenosine"
  misc_feature 9: /note="2'-O-Methylcytidine"
  misc_feature 10: /note="2'- fluoro-uridine"
  misc_feature 11: /note="2'-O-Methyluridine"
  misc_feature 12: /note="2'-Fluoro-cytidine"
  misc_feature 13: /note="2'-O-Methyladenosine"
  misc_feature 14: /note="2'-Fluoro-guanosine"
  misc_feature 15: /note="2'-O-Methylcytidine"
  misc_feature 16: /note="2'- fluoro-uridine"
  misc_feature 17: /note="2'-O-Methylcytidine"
  misc_feature 18: /note="2'-Fluoro-cytidine"
  misc_feature 19: /note="2'-O-Methyluridine"
  misc_feature 20: /note="2'-Fluoro-guanosine"
  misc_feature 21: /note="2'-O-Methylcytidine"
  misc_feature 22: /note="2'-fluoroadenosine"
  misc_feature 23: /note="Inverted DNA thymine"
ccacugaacuucagcuccugcat

SEQ ID NO: 107 - RNA, 21 nt, Artificial Sequence
  Synthetic Construct
  misc_feature 1: /note="2'- fluoro-uridine"
  misc_feature 2: /note="2'-Fluoro-guanosine"
  misc_feature 3: /note="2'-O-Methylcytidine"
  misc_feature 4: /note="2'-fluoroadenosine"
  misc_feature 5: /note="2'-O-Methylguanosine"
  misc_feature 6: /note="2'-Fluoro-guanosine"
  misc_feature 7: /note="2'-O-Methyladenosine"
  misc_feature 8: /note="2'-Fluoro-guanosine"
  misc_feature 9: /note="2'-O-Methylcytidine"
  misc_feature 10: /note="2'- fluoro-uridine"
  misc_feature 11: /note="2'-O-Methylguanosine"
  misc_feature 12: /note="2'-fluoroadenosine"
  misc_feature 13: /note="2'-O-Methyladenosine"
  misc_feature 14: /note="2'-Fluoro-guanosine"
  misc_feature 15: /note="2'-O-Methyluridine"
  misc_feature 16: /note="2'- fluoro-uridine"
  misc_feature 17: /note="2'-O-Methylcytidine"
  misc_feature 18: /note="2'-fluoroadenosine"
  misc_feature 19: /note="2'-O-Methylguanosine"
  misc_feature 20: /note="DNA thymine"
  misc_feature 21: /note="DNA thymine"
ugcaggagcugaaguucagtt

SEQ ID NO: 108 - RNA, 23 nt, Artificial Sequence
  Synthetic Construct
  misc_feature 1: /note="2'-O-Methylcytidine"
  misc_feature 2: /note="2'-O-Methylcytidine"
  misc_feature 3: /note="2'-O-Methyladenosine"
  misc_feature 4: /note="2'- fluoro-uridine"
  misc_feature 5: /note="2'-O-Methylguanosine"
  misc_feature 6: /note="2'-fluoroadenosine"
  misc_feature 7: /note="2'-O-Methyladenosine"
  misc_feature 8: /note="2'-Fluoro-cytidine"
  misc_feature 9: /note="2'-O-Methyluridine"
  misc_feature 10: /note="2'- fluoro-uridine"
  misc_feature 11: /note="2'-O-Methylcytidine"
  misc_feature 12: /note="2'-fluoroadenosine"
  misc_feature 13: /note="2'-O-Methylguanosine"
  misc_feature 14: /note="2'-Fluoro-cytidine"
  misc_feature 15: /note="2'-O-Methyluridine"
  misc_feature 16: /note="2'-Fluoro-cytidine"
  misc_feature 17: /note="2'-O-Methylcytidine"
  misc_feature 18: /note="2'- fluoro-uridine"
  misc_feature 19: /note="2'-O-Methylguanosine"
  misc_feature 20: /note="2'-Fluoro-cytidine"
  misc_feature 21: /note="2'-O-Methyladenosine"
  misc_feature 22: /note="2'-Fluoro-cytidine"
  misc_feature 23: /note="Inverted DNA thymine"
ccaugaacuucagcuccugcact

SEQ ID NO: 109 - RNA, 21 nt, Artificial Sequence
  Synthetic Construct
  misc_feature 1: /note="2'-Fluoro-guanosine"
  misc_feature 2: /note="2'- fluoro-uridine"
  misc_feature 3: /note="2'-O-Methylguanosine"
  misc_feature 4: /note="2'-Fluoro-cytidine"
  misc_feature 5: /note="2'-O-Methyladenosine"
  misc_feature 6: /note="2'-Fluoro-guanosine"
  misc_feature 7: /note="2'-O-Methylguanosine"
  misc_feature 8: /note="2'-fluoroadenosine"
  misc_feature 9: /note="2'-O-Methylguanosine"
  misc_feature 10: /note="2'-Fluoro-cytidine"
  misc_feature 11: /note="2'-O-Methyluridine"
  misc_feature 12: /note="2'-Fluoro-guanosine"
  misc_feature 13: /note="2'-O-Methyladenosine"
  misc_feature 14: /note="2'-fluoroadenosine"
  misc_feature 15: /note="2'-O-Methylguanosine"
  misc_feature 16: /note="2'- fluoro-uridine"
  misc_feature 17: /note="2'-O-Methyluridine"
  misc_feature 18: /note="2'-Fluoro-cytidine"
  misc_feature 19: /note="2'-O-Methyladenosine"
  misc_feature 20: /note="DNA thymine"
  misc_feature 21: /note="DNA thymine"
gugcaggagcugaaguucatt

SEQ ID NO: 110 - RNA, 23 nt, Artificial Sequence
  Synthetic Construct
  misc_feature 1: /note="2'-O-Methylcytidine"
  misc_feature 2: /note="2'-O-Methylcytidine"
  misc_feature 3: /note="2'-O-Methyladenosine"
  misc_feature 4: /note="2'-Fluoro-guanosine"
  misc_feature 5: /note="2'-O-Methylguanosine"
  misc_feature 6: /note="2'-fluoroadenosine"
  misc_feature 7: /note="2'-O-Methylcytidine"
  misc_feature 8: /note="2'-fluoroadenosine"
  misc_feature 9: /note="2'-O-Methylguanosine"
  misc_feature 10: /note="2'-Fluoro-cytidine"
  misc_feature 11: /note="2'-O-Methyladenosine"
  misc_feature 12: /note="2'-fluoroadenosine"
  misc_feature 13: /note="2'-O-Methylcytidine"
  misc_feature 14: /note="2'-Fluoro-cytidine"
  misc_feature 15: /note="2'-O-Methyluridine"
  misc_feature 16: /note="2'-Fluoro-cytidine"
  misc_feature 17: /note="2'-O-Methyluridine"
  misc_feature 18: /note="2'-Fluoro-cytidine"
  misc_feature 19: /note="2'-O-Methylcytidine"
  misc_feature 20: /note="2'-Fluoro-cytidine"
  misc_feature 21: /note="2'-O-Methylcytidine"
  misc_feature 22: /note="2'- fluoro-uridine"
  misc_feature 23: /note="Inverted DNA thymine"
ccaggacagcaaccucuccccut

SEQ ID NO: 111 - RNA, 21 nt, Artificial Sequence
  Synthetic Construct
  misc_feature 1: /note="2'-fluoroadenosine"
  misc_feature 2: /note="2'-Fluoro-guanosine"
  misc_feature 3: /note="2'-O-Methylguanosine"
  misc_feature 4: /note="2'-Fluoro-guanosine"
  misc_feature 5: /note="2'-O-Methylguanosine"
  misc_feature 6: /note="2'-fluoroadenosine"
  misc_feature 7: /note="2'-O-Methylguanosine"
  misc_feature 8: /note="2'-fluoroadenosine"
  misc_feature 9: /note="2'-O-Methylguanosine"
  misc_feature 10: /note="2'-Fluoro-guanosine"
  misc_feature 11: /note="2'-O-Methyluridine"
  misc_feature 12: /note="2'- fluoro-uridine"
  misc_feature 13: /note="2'-O-Methylguanosine"
  misc_feature 14: /note="2'-Fluoro-cytidine"
  misc_feature 15: /note="2'-O-Methyluridine"
  misc_feature 16: /note="2'-Fluoro-guanosine"
  misc_feature 17: /note="2'-O-Methyluridine"
  misc_feature 18: /note="2'-Fluoro-cytidine"
  misc_feature 19: /note="2'-O-Methylcytidine"
  misc_feature 20: /note="DNA thymine"
  misc_feature 21: /note="DNA thymine"
aggggagagguugcugucctt

SEQ ID NO: 112 - RNA, 23 nt, Artificial Sequence
  Synthetic Construct
  misc_feature 1: /note="2'-O-Methylcytidine"
  misc_feature 2: /note="2'-O-Methylcytidine"
  misc_feature 3: /note="2'-O-Methyladenosine"
  misc_feature 4: /note="2'-Fluoro-guanosine"
  misc_feature 5: /note="2'-O-Methyladenosine"
  misc_feature 6: /note="2'-Fluoro-cytidine"
  misc_feature 7: /note="2'-O-Methyladenosine"
  misc_feature 8: /note="2'-Fluoro-guanosine"
  misc_feature 9: /note="2'-O-Methylcytidine"
  misc_feature 10: /note="2'-fluoroadenosine"
  misc_feature 11: /note="2'-O-Methyladenosine"
  misc_feature 12: /note="2'-Fluoro-cytidine"
  misc_feature 13: /note="2'-O-Methylcytidine"
  misc_feature 14: /note="2'- fluoro-uridine"
  misc_feature 15: /note="2'-O-Methylcytidine"
  misc_feature 16: /note="2'- fluoro-uridine"
  misc_feature 17: /note="2'-O-Methylcytidine"
  misc_feature 18: /note="2'-Fluoro-cytidine"
  misc_feature 19: /note="2'-O-Methylcytidine"
  misc_feature 20: /note="2'-Fluoro-cytidine"
  misc_feature 21: /note="2'-O-Methyluridine"
  misc_feature 22: /note="2'-Fluoro-guanosine"
  misc_feature 23: /note="Inverted DNA thymine"
ccagacagcaaccucuccccugt

SEQ ID NO: 113 - RNA, 21 nt, Artificial Sequence
  Synthetic Construct
  misc_feature 1: /note="2'-Fluoro-cytidine"
  misc_feature 2: /note="2'-fluoroadenosine"
  misc_feature 3: /note="2'-O-Methylguanosine"
  misc_feature 4: /note="2'-Fluoro-guanosine"
  misc_feature 5: /note="2'-O-Methylguanosine"
  misc_feature 6: /note="2'-Fluoro-guanosine"
  misc_feature 7: /note="2'-O-Methyladenosine"
  misc_feature 8: /note="2'-Fluoro-guanosine"
  misc_feature 9: /note="2'-O-Methyladenosine"
  misc_feature 10: /note="2'-Fluoro-guanosine"
  misc_feature 11: /note="2'-O-Methylguanosine"
  misc_feature 12: /note="2'- fluoro-uridine"
  misc_feature 13: /note="2'-O-Methyluridine"
  misc_feature 14: /note="2'-Fluoro-guanosine"
  misc_feature 15: /note="2'-O-Methylcytidine"
  misc_feature 16: /note="2'- fluoro-uridine"
  misc_feature 17: /note="2'-O-Methylguanosine"
  misc_feature 18: /note="2'- fluoro-uridine"
  misc_feature 19: /note="2'-O-Methylcytidine"
  misc_feature 20: /note="DNA thymine"
  misc_feature 21: /note="DNA thymine"
caggggagagguugcuguctt

SEQ ID NO: 114 - RNA, 23 nt, Artificial Sequence
  Synthetic Construct
  misc_feature 1: /note="2'-O-Methylcytidine"
  misc_feature 2: /note="2'-O-Methylcytidine"
  misc_feature 3: /note="2'-O-Methyladenosine"
  misc_feature 4: /note="2'-fluoroadenosine"
  misc_feature 5: /note="2'-O-Methylcytidine"
  misc_feature 6: /note="2'-fluoroadenosine"
  misc_feature 7: /note="2'-O-Methylguanosine"
  misc_feature 8: /note="2'-Fluoro-cytidine"
  misc_feature 9: /note="2'-O-Methyladenosine"
  misc_feature 10: /note="2'-fluoroadenosine"
  misc_feature 11: /note="2'-O-Methylcytidine"
  misc_feature 12: /note="2'-Fluoro-cytidine"
  misc_feature 13: /note="2'-O-Methyluridine"
  misc_feature 14: /note="2'-Fluoro-cytidine"
  misc_feature 15: /note="2'-O-Methyluridine"
  misc_feature 16: /note="2'-Fluoro-cytidine"
  misc_feature 17: /note="2'-O-Methylcytidine"
  misc_feature 18: /note="2'-Fluoro-cytidine"
  misc_feature 19: /note="2'-O-Methylcytidine"
  misc_feature 20: /note="2'- fluoro-uridine"
  misc_feature 21: /note="2'-O-Methylguanosine"
  misc_feature 22: /note="2'-Fluoro-guanosine"
  misc_feature 23: /note="Inverted DNA thymine"
ccaacagcaaccucuccccuggt

SEQ ID NO: 115 - RNA, 21 nt, Artificial Sequence
  Synthetic Construct
  misc_feature 1: /note="2'-Fluoro-cytidine"
  misc_feature 2: /note="2'-Fluoro-cytidine"
  misc_feature 3: /note="2'-O-Methyladenosine"
  misc_feature 4: /note="2'-Fluoro-guanosine"
  misc_feature 5: /note="2'-O-Methylguanosine"
  misc_feature 6: /note="2'-Fluoro-guanosine"
  misc_feature 7: /note="2'-O-Methylguanosine"
  misc_feature 8: /note="2'-fluoroadenosine"
  misc_feature 9: /note="2'-O-Methylguanosine"
  misc_feature 10: /note="2'-fluoroadenosine"
  misc_feature 11: /note="2'-O-Methylguanosine"
  misc_feature 12: /note="2'-Fluoro-guanosine"
  misc_feature 13: /note="2'-O-Methyluridine"
  misc_feature 14: /note="2'- fluoro-uridine"
  misc_feature 15: /note="2'-O-Methylguanosine"
  misc_feature 16: /note="2'-Fluoro-cytidine"
  misc_feature 17: /note="2'-O-Methyluridine"
  misc_feature 18: /note="2'-Fluoro-guanosine"
  misc_feature 19: /note="2'-O-Methyluridine"
  misc_feature 20: /note="DNA thymine"
  misc_feature 21: /note="DNA thymine"
ccaggggagagguugcugutt

SEQ ID NO: 116 - RNA, 23 nt, Artificial Sequence
  Synthetic Construct
  misc_feature 1: /note="2'-O-Methylcytidine"
  misc_feature 2: /note="2'-O-Methylcytidine"
  misc_feature 3: /note="2'-O-Methyladenosine"
  misc_feature 4: /note="2'-fluoroadenosine"
  misc_feature 5: /note="2'-O-Methyluridine"
  misc_feature 6: /note="2'-Fluoro-guanosine"
  misc_feature 7: /note="2'-O-Methylguanosine"
  misc_feature 8: /note="2'-Fluoro-guanosine"
  misc_feature 9: /note="2'-O-Methylcytidine"
  misc_feature 10: /note="2'-fluoroadenosine"
  misc_feature 11: /note="2'-O-Methylcytidine"
  misc_feature 12: /note="2'-Fluoro-cytidine"
  misc_feature 13: /note="2'-O-Methylguanosine"
  misc_feature 14: /note="2'- fluoro-uridine"
  misc_feature 15: /note="2'-O-Methylcytidine"
  misc_feature 16: /note="2'-fluoroadenosine"
  misc_feature 17: /note="2'-O-Methylguanosine"
  misc_feature 18: /note="2'-Fluoro-cytidine"
  misc_feature 19: /note="2'-O-Methyluridine"
  misc_feature 20: /note="2'-Fluoro-cytidine"
  misc_feature 21: /note="2'-O-Methylcytidine"
  misc_feature 22: /note="2'-fluoroadenosine"
  misc_feature 23: /note="Inverted DNA thymine"
ccaaugggcaccgucagcuccat

SEQ ID NO: 117 - RNA, 21 nt, Artificial Sequence
  Synthetic Construct
  misc_feature 1: /note="2'-O-Methyladenosine"
  misc_feature 1: /note="2'- fluoro-uridine"
  misc_feature 2: /note="2'-Fluoro-guanosine"
  misc_feature 3: /note="2'-O-Methylguanosine"
  misc_feature 4: /note="2'-fluoroadenosine"
  misc_feature 5: /note="2'-O-Methylguanosine"
  misc_feature 6: /note="2'-Fluoro-cytidine"
  misc_feature 7: /note="2'-O-Methyluridine"
  misc_feature 8: /note="2'-Fluoro-guanosine"
  misc_feature 10: /note="2'-Fluoro-cytidine"
  misc_feature 11: /note="2'-O-Methylguanosine"
  misc_feature 12: /note="2'-Fluoro-guanosine"
  misc_feature 13: /note="2'-O-Methyluridine"
  misc_feature 14: /note="2'-Fluoro-guanosine"
  misc_feature 15: /note="2'-O-Methylcytidine"
  misc_feature 16: /note="2'-Fluoro-cytidine"
  misc_feature 17: /note="2'-O-Methylcytidine"
  misc_feature 18: /note="2'-fluoroadenosine"
  misc_feature 19: /note="2'-O-Methyluridine"
  misc_feature 20: /note="DNA thymine"
  misc_feature 21: /note="DNA thymine"
uggagcugacggugcccautt

SEQ ID NO: 118 - RNA, 23 nt, Artificial Sequence
  Synthetic Construct
  misc_feature 1: /note="2'-O-Methylcytidine"
  misc_feature 2: /note="2'-O-Methylcytidine"
  misc_feature 3: /note="2'-O-Methyladenosine"
  misc_feature 4: /note="2'-Fluoro-guanosine"
  misc_feature 5: /note="2'-O-Methylguanosine"
  misc_feature 6: /note="2'-fluoroadenosine"
  misc_feature 7: /note="2'-O-Methyluridine"
  misc_feature 8: /note="2'-Fluoro-guanosine"
  misc_feature 9: /note="2'-O-Methyladenosine"
  misc_feature 10: /note="2'-fluoroadenosine"
  misc_feature 11: /note="2'-O-Methyluridine"
  misc_feature 12: /note="2'-fluoroadenosine"
  misc_feature 13: /note="2'-O-Methylcytidine"
  misc_feature 14: /note="2'-Fluoro-cytidine"
  misc_feature 15: /note="2'-O-Methyladenosine"
  misc_feature 16: /note="2'-Fluoro-guanosine"
  misc_feature 17: /note="2'-O-Methylcytidine"
  misc_feature 18: /note="2'-Fluoro-cytidine"
  misc_feature 19: /note="2'-O-Methylcytidine"
  misc_feature 20: /note="2'-Fluoro-cytidine"
  misc_feature 21: /note="2'-O-Methylcytidine"
  misc_feature 22: /note="2'-Fluoro-cytidine"
  misc_feature 23: /note="Inverted DNA thymine"
ccaggaugaauaccagcccccct

SEQ ID NO: 119 - RNA, 21 nt, Artificial Sequence
  Synthetic Construct
  misc_feature 1: /note="2'-Fluoro-guanosine"
  misc_feature 2: /note="2'-Fluoro-guanosine"
  misc_feature 3: /note="2'-O-Methylguanosine"
  misc_feature 4: /note="2'-Fluoro-guanosine"
  misc_feature 5: /note="2'-O-Methylguanosine"
  misc_feature 6: /note="2'-Fluoro-guanosine"
  misc_feature 7: /note="2'-O-Methylcytidine"
  misc_feature 8: /note="2'- fluoro-uridine"
  misc_feature 9: /note="2'-O-Methylguanosine"
  misc_feature 10: /note="2'-Fluoro-guanosine"
  misc_feature 11: /note="2'-O-Methyluridine"
  misc_feature 12: /note="2'-fluoroadenosine"
  misc_feature 13: /note="2'-O-Methyluridine"
  misc_feature 14: /note="2'- fluoro-uridine"
  misc_feature 15: /note="2'-O-Methylcytidine"
  misc_feature 16: /note="2'-fluoroadenosine"
  misc_feature 17: /note="2'-O-Methyluridine"
  misc_feature 18: /note="2'-Fluoro-cytidine"
  misc_feature 19: /note="2'-O-Methylcytidine"
  misc_feature 20: /note="DNA thymine"
  misc_feature 21: /note="DNA thymine"
ggggggcugguauucaucctt

SEQ ID NO: 120 - RNA, 23 nt, Artificial Sequence
  Synthetic Construct
  misc_feature 1: /note="2'-O-Methylcytidine"
  misc_feature 2: /note="2'-O-Methylcytidine"
  misc_feature 3: /note="2'-O-Methyladenosine"
  misc_feature 4: /note="2'-Fluoro-guanosine"
  misc_feature 5: /note="2'-O-Methyladenosine"
  misc_feature 6: /note="2'- fluoro-uridine"
  misc_feature 7: /note="2'-O-Methylguanosine"
  misc_feature 8: /note="2'-fluoroadenosine"
  misc_feature 9: /note="2'-O-Methyladenosine"
  misc_feature 10: /note="2'- fluoro-uridine"
  misc_feature 11: /note="2'-O-Methyladenosine"
  misc_feature 12: /note="2'-Fluoro-cytidine"
  misc_feature 13: /note="2'-O-Methylcytidine"
  misc_feature 14: /note="2'-fluoroadenosine"
  misc_feature 15: /note="2'-O-Methylguanosine"
  misc_feature 16: /note="2'-Fluoro-cytidine"
  misc_feature 17: /note="2'-O-Methylcytidine"
  misc_feature 18: /note="2'-Fluoro-cytidine"
  misc_feature 19: /note="2'-O-Methylcytidine"
  misc_feature 20: /note="2'-Fluoro-cytidine"
  misc_feature 21: /note="2'-O-Methylcytidine"
  misc_feature 22: /note="2'-Fluoro-guanosine"
  misc_feature 23: /note="Inverted DNA thymine"
ccagaugaauaccagccccccgt

SEQ ID NO: 121 - RNA, 21 nt, Artificial Sequence
  Synthetic Construct
  misc_feature 1: /note="2'-Fluoro-cytidine"
  misc_feature 2: /note="2'-Fluoro-guanosine"
  misc_feature 3: /note="2'-O-Methylguanosine"
  misc_feature 4: /note="2'-Fluoro-guanosine"
  misc_feature 5: /note="2'-O-Methylguanosine"
  misc_feature 6: /note="2'-Fluoro-guanosine"
  misc_feature 7: /note="2'-O-Methylguanosine"
  misc_feature 8: /note="2'-Fluoro-cytidine"
  misc_feature 9: /note="2'-O-Methyluridine"
  misc_feature 10: /note="2'-Fluoro-guanosine"
  misc_feature 11: /note="2'-O-Methylguanosine"
  misc_feature 12: /note="2'- fluoro-uridine"
  misc_feature 13: /note="2'-O-Methyladenosine"
  misc_feature 14: /note="2'- fluoro-uridine"
  misc_feature 15: /note="2'-O-Methyluridine"
  misc_feature 16: /note="2'-Fluoro-cytidine"
  misc_feature 17: /note="2'-O-Methyladenosine"
  misc_feature 18: /note="2'- fluoro-uridine"
  misc_feature 19: /note="2'-O-Methylcytidine"
  misc_feature 20: /note="DNA thymine"
  misc_feature 21: /note="DNA thymine"
cggggggcugguauucauctt

SEQ ID NO: 122 - RNA, 23 nt, Artificial Sequence
  Synthetic Construct
  misc_feature 1: /note="2'-O-Methylcytidine"
  misc_feature 2: /note="2'-O-Methylcytidine"
  misc_feature 3: /note="2'-O-Methyladenosine"
  misc_feature 4: /note="2'-fluoroadenosine"
  misc_feature 5: /note="2'-O-Methyluridine"
  misc_feature 6: /note="2'-Fluoro-guanosine"
  misc_feature 7: /note="2'-O-Methyladenosine"
  misc_feature 8: /note="2'-fluoroadenosine"
  misc_feature 9: /note="2'-O-Methyluridine"
  misc_feature 10: /note="2'-fluoroadenosine"
  misc_feature 11: /note="2'-O-Methylcytidine"
  misc_feature 12: /note="2'-Fluoro-cytidine"
  misc_feature 13: /note="2'-O-Methyladenosine"
  misc_feature 14: /note="2'-Fluoro-guanosine"
  misc_feature 15: /note="2'-O-Methylcytidine"
  misc_feature 16: /note="2'-Fluoro-cytidine"
  misc_feature 17: /note="2'-O-Methylcytidine"
  misc_feature 18: /note="2'-Fluoro-cytidine"
  misc_feature 19: /note="2'-O-Methylcytidine"
  misc_feature 20: /note="2'-Fluoro-cytidine"
  misc_feature 21: /note="2'-O-Methylguanosine"
  misc_feature 22: /note="2'-fluoroadenosine"
  misc_feature 23: /note="Inverted DNA thymine"
ccaaugaauaccagccccccgat

SEQ ID NO: 123 - RNA, 21 nt, Artificial Sequence
  Synthetic Construct
  misc_feature 1: /note="2'- fluoro-uridine"
  misc_feature 2: /note="2'-Fluoro-cytidine"
  misc_feature 3: /note="2'-O-Methylguanosine"
  misc_feature 4: /note="2'-Fluoro-guanosine"
  misc_feature 5: /note="2'-O-Methylguanosine"
  misc_feature 6: /note="2'-Fluoro-guanosine"
  misc_feature 7: /note="2'-O-Methylguanosine"
  misc_feature 8: /note="2'-Fluoro-guanosine"
  misc_feature 9: /note="2'-O-Methylcytidine"
  misc_feature 10: /note="2'- fluoro-uridine"
  misc_feature 11: /note="2'-O-Methylguanosine"
  misc_feature 12: /note="2'-Fluoro-guanosine"
  misc_feature 13: /note="2'-O-Methyluridine"
  misc_feature 14: /note="2'-fluoroadenosine"
  misc_feature 15: /note="2'-O-Methyluridine"
  misc_feature 16: /note="2'- fluoro-uridine"
  misc_feature 17: /note="2'-O-Methylcytidine"
  misc_feature 18: /note="2'-fluoroadenosine"
  misc_feature 19: /note="2'-O-Methyluridine"
  misc_feature 20: /note="DNA thymine"
  misc_feature 21: /note="DNA thymine"
ucggggggcugguauucautt

SEQ ID NO: 124 - RNA, 23 nt, Artificial Sequence
  Synthetic Construct
  misc_feature 1: /note="2'-O-Methylcytidine"
  misc_feature 2: /note="2'-O-Methylcytidine"
  misc_feature 3: /note="2'-O-Methyladenosine"
  misc_feature 4: /note="2'-Fluoro-cytidine"
  misc_feature 5: /note="2'-O-Methyladenosine"
  misc_feature 6: /note="2'-fluoroadenosine"
  misc_feature 7: /note="2'-O-Methylguanosine"
  misc_feature 8: /note="2'-Fluoro-guanosine"
  misc_feature 9: /note="2'-O-Methylguanosine"
  misc_feature 10: /note="2'-Fluoro-guanosine"
  misc_feature 11: /note="2'-O-Methylguanosine"
  misc_feature 12: /note="2'-Fluoro-cytidine"
  misc_feature 13: /note="2'-O-Methyladenosine"
  misc_feature 14: /note="2'-fluoroadenosine"
  misc_feature 15: /note="2'-O-Methylguanosine"
  misc_feature 16: /note="2'-Fluoro-cytidine"
  misc_feature 17: /note="2'-O-Methyluridine"
  misc_feature 18: /note="2'-Fluoro-guanosine"
  misc_feature 19: /note="2'-O-Methylguanosine"
  misc_feature 20: /note="2'- fluoro-uridine"
  misc_feature 21: /note="2'-O-Methylcytidine"
  misc_feature 22: /note="2'- fluoro-uridine"
  misc_feature 23: /note="Inverted DNA thymine"
ccacaagggggcaagcuggucut

SEQ ID NO: 125 - RNA, 21 nt, Artificial Sequence
  Synthetic Construct
  misc_feature 1: /note="2'-fluoroadenosine"
  misc_feature 2: /note="2'-Fluoro-guanosine"
  misc_feature 3: /note="2'-O-Methyladenosine"
  misc_feature 4: /note="2'-Fluoro-cytidine"
  misc_feature 5: /note="2'-O-Methylcytidine"
  misc_feature 6: /note="2'-fluoroadenosine"
  misc_feature 7: /note="2'-O-Methylguanosine"
  misc_feature 8: /note="2'-Fluoro-cytidine"
  misc_feature 9: /note="2'-O-Methyluridine"
  misc_feature 10: /note="2'- fluoro-uridine"
  misc_feature 11: /note="2'-O-Methylguanosine"
  misc_feature 12: /note="2'-Fluoro-cytidine"
  misc_feature 13: /note="2'-O-Methylcytidine"
  misc_feature 14: /note="2'-Fluoro-cytidine"
  misc_feature 15: /note="2'-O-Methylcytidine"
  misc_feature 16: /note="2'-Fluoro-cytidine"
  misc_feature 17: /note="2'-O-Methyluridine"
  misc_feature 18: /note="2'- fluoro-uridine"
  misc_feature 19: /note="2'-O-Methylguanosine"
  misc_feature 20: /note="DNA thymine"
  misc_feature 21: /note="DNA thymine"
agaccagcuugcccccuugtt

SEQ ID NO: 126 - RNA, 23 nt, Artificial Sequence
  Synthetic Construct
  misc_feature 1: /note="2'-O-Methylcytidine"
  misc_feature 2: /note="2'-O-Methylcytidine"
  misc_feature 3: /note="2'-O-Methyladenosine"
  misc_feature 4: /note="2'-fluoroadenosine"
  misc_feature 5: /note="2'-O-Methyladenosine"
  misc_feature 6: /note="2'-Fluoro-guanosine"
  misc_feature 7: /note="2'-O-Methylguanosine"
  misc_feature 8: /note="2'-Fluoro-guanosine"
  misc_feature 9: /note="2'-O-Methylguanosine"
  misc_feature 10: /note="2'-Fluoro-guanosine"
  misc_feature 11: /note="2'-O-Methylcytidine"
  misc_feature 12: /note="2'-fluoroadenosine"
  misc_feature 13: /note="2'-O-Methyladenosine"
  misc_feature 14: /note="2'-Fluoro-guanosine"
  misc_feature 15: /note="2'-O-Methylcytidine"
  misc_feature 16: /note="2'- fluoro-uridine"
  misc_feature 17: /note="2'-O-Methylguanosine"
  misc_feature 18: /note="2'-Fluoro-guanosine"
  misc_feature 19: /note="2'-O-Methyluridine"
  misc_feature 20: /note="2'-Fluoro-cytidine"
  misc_feature 21: /note="2'-O-Methyluridine"
  misc_feature 22: /note="2'-Fluoro-guanosine"
  misc_feature 23: /note="Inverted DNA thymine"
ccaaagggggcaagcuggucugt

SEQ ID NO: 127 - RNA, 21 nt, Artificial Sequence
  Synthetic Construct
  misc_feature 1: /note="2'-Fluoro-cytidine"
  misc_feature 2: /note="2'-fluoroadenosine"
  misc_feature 3: /note="2'-O-Methylguanosine"
  misc_feature 4: /note="2'-fluoroadenosine"
  misc_feature 5: /note="2'-O-Methylcytidine"
  misc_feature 6: /note="2'-Fluoro-cytidine"
  misc_feature 7: /note="2'-O-Methyladenosine"
  misc_feature 8: /note="2'-Fluoro-guanosine"
  misc_feature 9: /note="2'-O-Methylcytidine"
  misc_feature 10: /note="2'- fluoro-uridine"
  misc_feature 11: /note="2'-O-Methyluridine"
  misc_feature 12: /note="2'-Fluoro-guanosine"
  misc_feature 13: /note="2'-O-Methylcytidine"
  misc_feature 14: /note="2'-Fluoro-cytidine"
  misc_feature 15: /note="2'-O-Methylcytidine"
  misc_feature 16: /note="2'-Fluoro-cytidine"
  misc_feature 17: /note="2'-O-Methylcytidine"
  misc_feature 18: /note="2'- fluoro-uridine"
  misc_feature 19: /note="2'-O-Methyluridine"
  misc_feature 20: /note="DNA thymine"
  misc_feature 21: /note="DNA thymine"
cagaccagcuugcccccuutt

SEQ ID NO: 128 - RNA, 23 nt, Artificial Sequence
  Synthetic Construct
  misc_feature 1: /note="2'-O-Methylcytidine"
  misc_feature 2: /note="2'-O-Methylcytidine"
  misc_feature 3: /note="2'-O-Methyladenosine"
  misc_feature 4: /note="2'- fluoro-uridine"
  misc_feature 5: /note="2'-O-Methylguanosine"
  misc_feature 6: /note="2'-Fluoro-guanosine"
  misc_feature 7: /note="2'-O-Methyladenosine"
  misc_feature 8: /note="2'-Fluoro-cytidine"
  misc_feature 9: /note="2'-O-Methylcytidine"
  misc_feature 10: /note="2'-Fluoro-cytidine"
  misc_feature 11: /note="2'-O-Methyluridine"
  misc_feature 12: /note="2'-Fluoro-guanosine"
  misc_feature 13: /note="2'-O-Methyladenosine"
  misc_feature 14: /note="2'-Fluoro-cytidine"
  misc_feature 15: /note="2'-O-Methyluridine"
  misc_feature 16: /note="2'-Fluoro-guanosine"
  misc_feature 17: /note="2'-O-Methylguanosine"
  misc_feature 18: /note="2'-Fluoro-cytidine"
  misc_feature 19: /note="2'-O-Methyluridine"
  misc_feature 20: /note="2'-Fluoro-guanosine"
  misc_feature 21: /note="2'-O-Methylcytidine"
  misc_feature 22: /note="2'-fluoroadenosine"
  misc_feature 23: /note="Inverted DNA thymine"
ccauggacccugacuggcugcat

SEQ ID NO: 129 - RNA, 21 nt, Artificial Sequence
  Synthetic Construct
  misc_feature 1: /note="2'- fluoro-uridine"
  misc_feature 2: /note="2'-Fluoro-guanosine"
  misc_feature 3: /note="2'-O-Methylcytidine"
  misc_feature 4: /note="2'-fluoroadenosine"
  misc_feature 5: /note="2'-O-Methylguanosine"
  misc_feature 6: /note="2'-Fluoro-cytidine"
  misc_feature 7: /note="2'-O-Methylcytidine"
  misc_feature 8: /note="2'-fluoroadenosine"
  misc_feature 9: /note="2'-O-Methylguanosine"
  misc_feature 10: /note="2'- fluoro-uridine"
  misc_feature 11: /note="2'-O-Methylcytidine"
  misc_feature 12: /note="2'-fluoroadenosine"
  misc_feature 13: /note="2'-O-Methylguanosine"
  misc_feature 14: /note="2'-Fluoro-guanosine"
  misc_feature 15: /note="2'-O-Methylguanosine"
  misc_feature 16: /note="2'- fluoro-uridine"
  misc_feature 17: /note="2'-O-Methylcytidine"
  misc_feature 18: /note="2'-Fluoro-cytidine"
  misc_feature 19: /note="2'-O-Methyladenosine"
  misc_feature 20: /note="DNA thymine"
  misc_feature 21: /note="DNA thymine"
ugcagccagucaggguccatt

SEQ ID NO: 130 - RNA, 23 nt, Artificial Sequence
  Synthetic Construct
  misc_feature 1: /note="2'-O-Methylcytidine"
  misc_feature 2: /note="2'-O-Methylcytidine"
  misc_feature 3: /note="2'-O-Methyladenosine"
  misc_feature 4: /note="2'-Fluoro-guanosine"
  misc_feature 5: /note="2'-O-Methyladenosine"
  misc_feature 6: /note="2'-Fluoro-cytidine"
  misc_feature 7: /note="2'-O-Methylcytidine"
  misc_feature 8: /note="2'-Fluoro-cytidine"
  misc_feature 9: /note="2'-O-Methyluridine"
  misc_feature 10: /note="2'-Fluoro-guanosine"
  misc_feature 11: /note="2'-O-Methyladenosine"
  misc_feature 12: /note="2'-Fluoro-cytidine"
  misc_feature 13: /note="2'-O-Methyluridine"
  misc_feature 14: /note="2'-Fluoro-guanosine"
  misc_feature 15: /note="2'-O-Methylguanosine"
  misc_feature 16: /note="2'-Fluoro-cytidine"
  misc_feature 17: /note="2'-O-Methyluridine"
  misc_feature 18: /note="2'-Fluoro-guanosine"
  misc_feature 19: /note="2'-O-Methylcytidine"
  misc_feature 20: /note="2'-fluoroadenosine"
  misc_feature 21: /note="2'-O-Methylguanosine"
  misc_feature 22: /note="2'- fluoro-uridine"
  misc_feature 23: /note="Inverted DNA thymine"
ccagacccugacuggcugcagut

SEQ ID NO: 131 - RNA, 21 nt, Artificial Sequence
  Synthetic Construct
  misc_feature 1: /note="2'-fluoroadenosine"
  misc_feature 2: /note="2'-Fluoro-cytidine"
  misc_feature 3: /note="2'-O-Methyluridine"
  misc_feature 4: /note="2'-Fluoro-guanosine"
  misc_feature 5: /note="2'-O-Methylcytidine"
  misc_feature 6: /note="2'-fluoroadenosine"
  misc_feature 7: /note="2'-O-Methylguanosine"
  misc_feature 8: /note="2'-Fluoro-cytidine"
  misc_feature 9: /note="2'-O-Methylcytidine"
  misc_feature 10: /note="2'-fluoroadenosine"
  misc_feature 11: /note="2'-O-Methylguanosine"
  misc_feature 12: /note="2'- fluoro-uridine"
  misc_feature 13: /note="2'-O-Methylcytidine"
  misc_feature 14: /note="2'-fluoroadenosine"
  misc_feature 15: /note="2'-O-Methylguanosine"
  misc_feature 16: /note="2'-Fluoro-guanosine"
  misc_feature 17: /note="2'-O-Methylguanosine"
  misc_feature 18: /note="2'- fluoro-uridine"
  misc_feature 19: /note="2'-O-Methylcytidine"
  misc_feature 20: /note="DNA thymine"
  misc_feature 21: /note="DNA thymine"
acugcagccagucaggguctt

SEQ ID NO: 132 - RNA, 23 nt, Artificial Sequence
  Synthetic Construct
  misc_feature 1: /note="2'-O-Methylcytidine"
  misc_feature 2: /note="2'-O-Methylcytidine"
  misc_feature 3: /note="2'-O-Methyladenosine"
  misc_feature 4: /note="2'- fluoro-uridine"
  misc_feature 5: /note="2'-O-Methylguanosine"
  misc_feature 6: /note="2'-fluoroadenosine"
  misc_feature 7: /note="2'-O-Methylcytidine"
  misc_feature 8: /note="2'- fluoro-uridine"
  misc_feature 9: /note="2'-O-Methylguanosine"
  misc_feature 10: /note="2'-Fluoro-guanosine"
  misc_feature 11: /note="2'-O-Methylcytidine"
  misc_feature 12: /note="2'- fluoro-uridine"
  misc_feature 13: /note="2'-O-Methylguanosine"
  misc_feature 14: /note="2'-Fluoro-cytidine"
  misc_feature 15: /note="2'-O-Methyladenosine"
  misc_feature 16: /note="2'-Fluoro-guanosine"
  misc_feature 17: /note="2'-O-Methyluridine"
  misc_feature 18: /note="2'-Fluoro-guanosine"
  misc_feature 19: /note="2'-O-Methylcytidine"
  misc_feature 20: /note="2'-Fluoro-cytidine"
  misc_feature 21: /note="2'-O-Methylcytidine"
  misc_feature 22: /note="2'- fluoro-uridine"
  misc_feature 23: /note="Inverted DNA thymine"
ccaugacuggcugcagugcccut

SEQ ID NO: 133 - RNA, 21 nt, Artificial Sequence
  Synthetic Construct
  misc_feature 1: /note="2'-fluoroadenosine"
  misc_feature 2: /note="2'-Fluoro-guanosine"
  misc_feature 3: /note="2'-O-Methylguanosine"
  misc_feature 4: /note="2'-Fluoro-guanosine"
  misc_feature 5: /note="2'-O-Methylcytidine"
  misc_feature 6: /note="2'-fluoroadenosine"
  misc_feature 7: /note="2'-O-Methylcytidine"
  misc_feature 8: /note="2'- fluoro-uridine"
  misc_feature 9: /note="2'-O-Methylguanosine"
  misc_feature 10: /note="2'-Fluoro-cytidine"
  misc_feature 11: /note="2'-O-Methyladenosine"
  misc_feature 12: /note="2'-Fluoro-guanosine"
  misc_feature 13: /note="2'-O-Methylcytidine"
  misc_feature 14: /note="2'-Fluoro-cytidine"
  misc_feature 15: /note="2'-O-Methyladenosine"
  misc_feature 16: /note="2'-Fluoro-guanosine"
  misc_feature 17: /note="2'-O-Methyluridine"
  misc_feature 18: /note="2'-Fluoro-cytidine"
  misc_feature 19: /note="2'-O-Methyladenosine"
  misc_feature 20: /note="DNA thymine"
  misc_feature 21: /note="DNA thymine"
agggcacugcagccagucatt

SEQ ID NO: 134 - RNA, 23 nt, Artificial Sequence
  Synthetic Construct
  misc_feature 1: /note="2'-O-Methylcytidine"
  misc_feature 2: /note="2'-O-Methylcytidine"
  misc_feature 3: /note="2'-O-Methyladenosine"
  misc_feature 4: /note="2'- fluoro-uridine"
  misc_feature 5: /note="2'-O-Methylcytidine"
  misc_feature 6: /note="2'- fluoro-uridine"
  misc_feature 7: /note="2'-O-Methyluridine"
  misc_feature 8: /note="2'-Fluoro-cytidine"
  misc_feature 9: /note="2'-O-Methylcytidine"
  misc_feature 10: /note="2'-Fluoro-cytidine"
  misc_feature 11: /note="2'-O-Methyladenosine"
  misc_feature 12: /note="2'- fluoro-uridine"
  misc_feature 13: /note="2'-O-Methylguanosine"
  misc_feature 14: /note="2'-Fluoro-guanosine"
  misc_feature 15: /note="2'-O-Methyladenosine"
  misc_feature 16: /note="2'- fluoro-uridine"
  misc_feature 17: /note="2'-O-Methyladenosine"
  misc_feature 18: /note="2'-Fluoro-guanosine"
  misc_feature 19: /note="2'-O-Methylguanosine"
  misc_feature 20: /note="2'-Fluoro-guanosine"
  misc_feature 21: /note="2'-O-Methylguanosine"
  misc_feature 22: /note="2'-fluoroadenosine"
  misc_feature 23: /note="Inverted DNA thymine"
ccaucuucccauggauaggggat

SEQ ID NO: 135 - RNA, 21 nt, Artificial Sequence
  Synthetic Construct
  misc_feature 1: /note="2'- fluoro-uridine"
  misc_feature 2: /note="2'-Fluoro-cytidine"
  misc_feature 3: /note="2'-O-Methylcytidine"
  misc_feature 4: /note="2'-Fluoro-cytidine"
  misc_feature 5: /note="2'-O-Methylcytidine"
  misc_feature 6: /note="2'- fluoro-uridine"
  misc_feature 7: /note="2'-O-Methyladenosine"
  misc_feature 8: /note="2'- fluoro-uridine"
  misc_feature 9: /note="2'-O-Methylcytidine"
  misc_feature 10: /note="2'-Fluoro-cytidine"
  misc_feature 11: /note="2'-O-Methyladenosine"
  misc_feature 12: /note="2'- fluoro-uridine"
  misc_feature 13: /note="2'-O-Methylguanosine"
  misc_feature 14: /note="2'-Fluoro-guanosine"
  misc_feature 15: /note="2'-O-Methylguanosine"
  misc_feature 16: /note="2'-fluoroadenosine"
  misc_feature 17: /note="2'-O-Methyladenosine"
  misc_feature 18: /note="2'-Fluoro-guanosine"
  misc_feature 19: /note="2'-O-Methyladenosine"
  misc_feature 20: /note="DNA thymine"
  misc_feature 21: /note="DNA thymine"
uccccuauccaugggaagatt

SEQ ID NO: 136 - RNA, 23 nt, Artificial Sequence
  Synthetic Construct
  misc_feature 1: /note="2'-O-Methylcytidine"
  misc_feature 2: /note="2'-O-Methylcytidine"
  misc_feature 3: /note="2'-O-Methyladenosine"
  misc_feature 4: /note="2'-Fluoro-cytidine"
  misc_feature 5: /note="2'-O-Methyluridine"
  misc_feature 6: /note="2'- fluoro-uridine"
  misc_feature 7: /note="2'-O-Methylcytidine"
  misc_feature 8: /note="2'-Fluoro-cytidine"
  misc_feature 9: /note="2'-O-Methylcytidine"
  misc_feature 10: /note="2'-fluoroadenosine"
  misc_feature 11: /note="2'-O-Methyluridine"
  misc_feature 12: /note="2'-Fluoro-guanosine"
  misc_feature 13: /note="2'-O-Methylguanosine"
  misc_feature 14: /note="2'-fluoroadenosine"
  misc_feature 15: /note="2'-O-Methyluridine"
  misc_feature 16: /note="2'-fluoroadenosine"
  misc_feature 17: /note="2'-O-Methylguanosine"
  misc_feature 18: /note="2'-Fluoro-guanosine"
  misc_feature 19: /note="2'-O-Methylguanosine"
  misc_feature 20: /note="2'-Fluoro-guanosine"
  misc_feature 21: /note="2'-O-Methyladenosine"
  misc_feature 22: /note="2'-Fluoro-guanosine"
  misc_feature 23: /note="Inverted DNA thymine"
ccacuucccauggauaggggagt

SEQ ID NO: 137 - RNA, 21 nt, Artificial Sequence
  Synthetic Construct
  misc_feature 1: /note="2'-Fluoro-cytidine"
  misc_feature 2: /note="2'- fluoro-uridine"
  misc_feature 3: /note="2'-O-Methylcytidine"
  misc_feature 4: /note="2'-Fluoro-cytidine"
  misc_feature 5: /note="2'-O-Methylcytidine"
  misc_feature 6: /note="2'-Fluoro-cytidine"
  misc_feature 7: /note="2'-O-Methyluridine"
  misc_feature 8: /note="2'-fluoroadenosine"
  misc_feature 9: /note="2'-O-Methyluridine"
  misc_feature 10: /note="2'-Fluoro-cytidine"
  misc_feature 11: /note="2'-O-Methylcytidine"
  misc_feature 12: /note="2'-fluoroadenosine"
  misc_feature 13: /note="2'-O-Methyluridine"
  misc_feature 14: /note="2'-Fluoro-guanosine"
  misc_feature 15: /note="2'-O-Methylguanosine"
  misc_feature 16: /note="2'-Fluoro-guanosine"
  misc_feature 17: /note="2'-O-Methyladenosine"
  misc_feature 18: /note="2'-fluoroadenosine"
  misc_feature 19: /note="2'-O-Methylguanosine"
  misc_feature 20: /note="DNA thymine"
  misc_feature 21: /note="DNA thymine"
cuccccuauccaugggaagtt

SEQ ID NO: 138 - RNA, 23 nt, Artificial Sequence
  Synthetic Construct
  misc_feature 1: /note="2'-O-Methylcytidine"
  misc_feature 2: /note="2'-O-Methylcytidine"
  misc_feature 3: /note="2'-O-Methyladenosine"
  misc_feature 4: /note="2'- fluoro-uridine"
  misc_feature 5: /note="2'-O-Methyluridine"
  misc_feature 6: /note="2'-Fluoro-cytidine"
  misc_feature 7: /note="2'-O-Methylcytidine"
  misc_feature 8: /note="2'-Fluoro-cytidine"
  misc_feature 9: /note="2'-O-Methyladenosine"
  misc_feature 10: /note="2'- fluoro-uridine"
  misc_feature 11: /note="2'-O-Methylguanosine"
  misc_feature 12: /note="2'-Fluoro-guanosine"
  misc_feature 13: /note="2'-O-Methyladenosine"
  misc_feature 14: /note="2'- fluoro-uridine"
  misc_feature 15: /note="2'-O-Methyladenosine"
  misc_feature 16: /note="2'-Fluoro-guanosine"
  misc_feature 17: /note="2'-O-Methylguanosine"
  misc_feature 18: /note="2'-Fluoro-guanosine"
  misc_feature 19: /note="2'-O-Methylguanosine"
  misc_feature 20: /note="2'-fluoroadenosine"
  misc_feature 21: /note="2'-O-Methylguanosine"
  misc_feature 22: /note="2'-Fluoro-guanosine"
  misc_feature 23: /note="Inverted DNA thymine"
ccauucccauggauaggggaggt

SEQ ID NO: 139 - RNA, 21 nt, Artificial Sequence
  Synthetic Construct
  misc_feature 1: /note="2'-Fluoro-cytidine"
  misc_feature 2: /note="2'-Fluoro-cytidine"
  misc_feature 3: /note="2'-O-Methyluridine"
  misc_feature 4: /note="2'-Fluoro-cytidine"
  misc_feature 5: /note="2'-O-Methylcytidine"
  misc_feature 6: /note="2'-Fluoro-cytidine"
  misc_feature 7: /note="2'-O-Methylcytidine"
  misc_feature 8: /note="2'- fluoro-uridine"
  misc_feature 9: /note="2'-O-Methyladenosine"
  misc_feature 10: /note="2'- fluoro-uridine"
  misc_feature 11: /note="2'-O-Methylcytidine"
  misc_feature 12: /note="2'-Fluoro-cytidine"
  misc_feature 13: /note="2'-O-Methyladenosine"
  misc_feature 14: /note="2'- fluoro-uridine"
  misc_feature 15: /note="2'-O-Methylguanosine"
  misc_feature 16: /note="2'-Fluoro-guanosine"
  misc_feature 17: /note="2'-O-Methylguanosine"
  misc_feature 18: /note="2'-fluoroadenosine"
  misc_feature 19: /note="2'-O-Methyladenosine"
  misc_feature 20: /note="DNA thymine"
  misc_feature 21: /note="DNA thymine"
ccuccccuauccaugggaatt

SEQ ID NO: 140 - RNA, 23 nt, Artificial Sequence
  Synthetic Construct
  misc_feature 1: /note="2'-O-Methylcytidine"
  misc_feature 2: /note="2'-O-Methylcytidine"
  misc_feature 3: /note="2'-O-Methyladenosine"
  misc_feature 4: /note="2'-Fluoro-guanosine"
  misc_feature 5: /note="2'-O-Methyluridine"
  misc_feature 6: /note="2'-fluoroadenosine"
  misc_feature 7: /note="2'-O-Methylguanosine"
  misc_feature 8: /note="2'-Fluoro-guanosine"
  misc_feature 9: /note="2'-O-Methylguanosine"
  misc_feature 10: /note="2'-Fluoro-guanosine"
  misc_feature 11: /note="2'-O-Methylcytidine"
  misc_feature 12: /note="2'- fluoro-uridine"
  misc_feature 13: /note="2'-O-Methylguanosine"
  misc_feature 14: /note="2'-Fluoro-cytidine"
  misc_feature 15: /note="2'-O-Methyladenosine"
  misc_feature 16: /note="2'-Fluoro-guanosine"
  misc_feature 17: /note="2'-O-Methylguanosine"
  misc_feature 18: /note="2'-Fluoro-guanosine"
  misc_feature 19: /note="2'-O-Methyladenosine"
  misc_feature 20: /note="2'-Fluoro-cytidine"
  misc_feature 21: /note="2'-O-Methyladenosine"
  misc_feature 22: /note="2'-fluoroadenosine"
  misc_feature 23: /note="Inverted DNA thymine"
ccaguaggggcugcagggacaat

SEQ ID NO: 141 - RNA, 21 nt, Artificial Sequence
  Synthetic Construct
  misc_feature 1: /note="2'- fluoro-uridine"
  misc_feature 2: /note="2'- fluoro-uridine"
  misc_feature 3: /note="2'-O-Methylguanosine"
  misc_feature 4: /note="2'- fluoro-uridine"
  misc_feature 5: /note="2'-O-Methylcytidine"
  misc_feature 6: /note="2'-Fluoro-cytidine"
  misc_feature 7: /note="2'-O-Methylcytidine"
  misc_feature 8: /note="2'- fluoro-uridine"
  misc_feature 9: /note="2'-O-Methylguanosine"
  misc_feature 10: /note="2'-Fluoro-cytidine"
  misc_feature 11: /note="2'-O-Methyladenosine"
  misc_feature 12: /note="2'-Fluoro-guanosine"
  misc_feature 13: /note="2'-O-Methylcytidine"
  misc_feature 14: /note="2'-Fluoro-cytidine"
  misc_feature 15: /note="2'-O-Methylcytidine"
  misc_feature 16: /note="2'-Fluoro-cytidine"
  misc_feature 17: /note="2'-O-Methyluridine"
  misc_feature 18: /note="2'-fluoroadenosine"
  misc_feature 19: /note="2'-O-Methylcytidine"
  misc_feature 20: /note="DNA thymine"
  misc_feature 21: /note="DNA thymine"
uugucccugcagccccuactt

SEQ ID NO: 142 - RNA, 23 nt, Artificial Sequence
  Synthetic Construct
  misc_feature 1: /note="2'-O-Methylcytidine"
  misc_feature 2: /note="2'-O-Methylcytidine"
  misc_feature 3: /note="2'-O-Methyladenosine"
  misc_feature 4: /note="2'-Fluoro-guanosine"
  misc_feature 5: /note="2'-O-Methyladenosine"
  misc_feature 6: /note="2'-Fluoro-guanosine"
  misc_feature 7: /note="2'-O-Methyluridine"
  misc_feature 8: /note="2'-Fluoro-guanosine"
  misc_feature 9: /note="2'-O-Methyluridine"
  misc_feature 10: /note="2'-Fluoro-guanosine"
  misc_feature 11: /note="2'-O-Methyladenosine"
  misc_feature 12: /note="2'-fluoroadenosine"
  misc_feature 13: /note="2'-O-Methyladenosine"
  misc_feature 14: /note="2'-Fluoro-guanosine"
  misc_feature 15: /note="2'-O-Methylguanosine"
  misc_feature 16: /note="2'- fluoro-uridine"
  misc_feature 17: /note="2'-O-Methylguanosine"
  misc_feature 18: /note="2'-Fluoro-cytidine"
  misc_feature 19: /note="2'-O-Methyluridine"
  misc_feature 20: /note="2'-Fluoro-guanosine"
  misc_feature 21: /note="2'-O-Methyladenosine"
  misc_feature 22: /note="2'- fluoro-uridine"
  misc_feature 23: /note="Inverted DNA thymine"
ccagagugugaaaggugcugaut

SEQ ID NO: 143 - RNA, 21 nt, Artificial Sequence
  Synthetic Construct
  misc_feature 1: /note="2'-fluoroadenosine"
  misc_feature 2: /note="2'- fluoro-uridine"
  misc_feature 3: /note="2'-O-Methylcytidine"
  misc_feature 4: /note="2'-fluoroadenosine"
  misc_feature 5: /note="2'-O-Methylguanosine"
  misc_feature 6: /note="2'-Fluoro-cytidine"
  misc_feature 7: /note="2'-O-Methyladenosine"
  misc_feature 8: /note="2'-Fluoro-cytidine"
  misc_feature 9: /note="2'-O-Methylcytidine"
  misc_feature 10: /note="2'- fluoro-uridine"
  misc_feature 11: /note="2'-O-Methyluridine"
  misc_feature 12: /note="2'- fluoro-uridine"
  misc_feature 13: /note="2'-O-Methylcytidine"
  misc_feature 14: /note="2'-fluoroadenosine"
  misc_feature 15: /note="2'-O-Methylcytidine"
  misc_feature 16: /note="2'-fluoroadenosine"
  misc_feature 17: /note="2'-O-Methylcytidine"
  misc_feature 18: /note="2'- fluoro-uridine"
  misc_feature 19: /note="2'-O-Methylcytidine"
  misc_feature 20: /note="DNA thymine"
  misc_feature 21: /note="DNA thymine"
aucagcaccuuucacacuctt

SEQ ID NO: 144 - RNA, 23 nt, Artificial Sequence
  Synthetic Construct
  misc_feature 1: /note="2'-O-Methylcytidine"
  misc_feature 2: /note="2'-O-Methylcytidine"
  misc_feature 3: /note="2'-O-Methyladenosine"
  misc_feature 4: /note="2'-fluoroadenosine"
  misc_feature 5: /note="2'-O-Methylguanosine"
  misc_feature 6: /note="2'- fluoro-uridine"
  misc_feature 7: /note="2'-O-Methylguanosine"
  misc_feature 8: /note="2'- fluoro-uridine"
  misc_feature 9: /note="2'-O-Methylguanosine"
  misc_feature 10: /note="2'-fluoroadenosine"
  misc_feature 11: /note="2'-O-Methyladenosine"
  misc_feature 12: /note="2'-fluoroadenosine"
  misc_feature 13: /note="2'-O-Methylguanosine"
  misc_feature 14: /note="2'-Fluoro-guanosine"
  misc_feature 15: /note="2'-O-Methyluridine"
  misc_feature 16: /note="2'-Fluoro-guanosine"
  misc_feature 17: /note="2'-O-Methylcytidine"
  misc_feature 18: /note="2'- fluoro-uridine"
  misc_feature 19: /note="2'-O-Methylguanosine"
  misc_feature 20: /note="2'-fluoroadenosine"
  misc_feature 21: /note="2'-O-Methyluridine"
  misc_feature 22: /note="2'-Fluoro-guanosine"
  misc_feature 23: /note="Inverted DNA thymine"
ccaagugugaaaggugcugaugt

SEQ ID NO: 145 - RNA, 21 nt, Artificial Sequence
  Synthetic Construct
  misc_feature 1: /note="2'-Fluoro-cytidine"
  misc_feature 2: /note="2'-fluoroadenosine"
  misc_feature 3: /note="2'-O-Methyluridine"
  misc_feature 4: /note="2'-Fluoro-cytidine"
  misc_feature 5: /note="2'-O-Methyladenosine"
  misc_feature 6: /note="2'-Fluoro-guanosine"
  misc_feature 7: /note="2'-O-Methylcytidine"
  misc_feature 8: /note="2'-fluoroadenosine"
  misc_feature 9: /note="2'-O-Methylcytidine"
  misc_feature 10: /note="2'-Fluoro-cytidine"
  misc_feature 11: /note="2'-O-Methyluridine"
  misc_feature 12: /note="2'- fluoro-uridine"
  misc_feature 13: /note="2'-O-Methyluridine"
  misc_feature 14: /note="2'-Fluoro-cytidine"
  misc_feature 15: /note="2'-O-Methyladenosine"
  misc_feature 16: /note="2'-Fluoro-cytidine"
  misc_feature 17: /note="2'-O-Methyladenosine"
  misc_feature 18: /note="2'-Fluoro-cytidine"
  misc_feature 19: /note="2'-O-Methyluridine"
  misc_feature 20: /note="DNA thymine"
  misc_feature 21: /note="DNA thymine"
caucagcaccuuucacacutt

SEQ ID NO: 146 - RNA, 23 nt, Artificial Sequence
  Synthetic Construct
  misc_feature 1: /note="2'-O-Methylcytidine"
  misc_feature 2: /note="2'-O-Methylcytidine"
  misc_feature 3: /note="2'-O-Methyladenosine"
  misc_feature 4: /note="2'-Fluoro-guanosine"
  misc_feature 5: /note="2'-O-Methyluridine"
  misc_feature 6: /note="2'-Fluoro-guanosine"
  misc_feature 7: /note="2'-O-Methyluridine"
  misc_feature 8: /note="2'-Fluoro-guanosine"
  misc_feature 9: /note="2'-O-Methyladenosine"
  misc_feature 10: /note="2'-fluoroadenosine"
  misc_feature 11: /note="2'-O-Methyladenosine"
  misc_feature 12: /note="2'-Fluoro-guanosine"
  misc_feature 13: /note="2'-O-Methylguanosine"
  misc_feature 14: /note="2'- fluoro-uridine"
  misc_feature 15: /note="2'-O-Methylguanosine"
  misc_feature 16: /note="2'-Fluoro-cytidine"
  misc_feature 17: /note="2'-O-Methyluridine"
  misc_feature 18: /note="2'-Fluoro-guanosine"
  misc_feature 19: /note="2'-O-Methyladenosine"
  misc_feature 20: /note="2'- fluoro-uridine"
  misc_feature 21: /note="2'-O-Methylguanosine"
  misc_feature 22: /note="2'-Fluoro-guanosine"
  misc_feature 23: /note="Inverted DNA thymine"
ccagugugaaaggugcugauggt

SEQ ID NO: 147 - RNA, 21 nt, Artificial Sequence
  Synthetic Construct
  misc_feature 1: /note="2'-Fluoro-cytidine"
  misc_feature 2: /note="2'-Fluoro-cytidine"
  misc_feature 3: /note="2'-O-Methyladenosine"
  misc_feature 4: /note="2'- fluoro-uridine"
  misc_feature 5: /note="2'-O-Methylcytidine"
  misc_feature 6: /note="2'-fluoroadenosine"
  misc_feature 7: /note="2'-O-Methylguanosine"
  misc_feature 8: /note="2'-Fluoro-cytidine"
  misc_feature 9: /note="2'-O-Methyladenosine"
  misc_feature 10: /note="2'-Fluoro-cytidine"
  misc_feature 11: /note="2'-O-Methylcytidine"
  misc_feature 12: /note="2'- fluoro-uridine"
  misc_feature 13: /note="2'-O-Methyluridine"
  misc_feature 14: /note="2'- fluoro-uridine"
  misc_feature 15: /note="2'-O-Methylcytidine"
  misc_feature 16: /note="2'-fluoroadenosine"
  misc_feature 17: /note="2'-O-Methylcytidine"
  misc_feature 18: /note="2'-fluoroadenosine"
  misc_feature 19: /note="2'-O-Methylcytidine"
  misc_feature 20: /note="DNA thymine"
  misc_feature 21: /note="DNA thymine"
ccaucagcaccuuucacactt

SEQ ID NO: 148 - RNA, 23 nt, Artificial Sequence
  Synthetic Construct
  misc_feature 1: /note="2'-O-Methylcytidine"
  misc_feature 2: /note="2'-O-Methylcytidine"
  misc_feature 3: /note="2'-O-Methyladenosine"
  misc_feature 4: /note="2'- fluoro-uridine"
  misc_feature 5: /note="2'-O-Methylguanosine"
  misc_feature 6: /note="2'- fluoro-uridine"
  misc_feature 7: /note="2'-O-Methylguanosine"
  misc_feature 8: /note="2'-fluoroadenosine"
  misc_feature 9: /note="2'-O-Methyladenosine"
  misc_feature 10: /note="2'-fluoroadenosine"
  misc_feature 11: /note="2'-O-Methylguanosine"
  misc_feature 12: /note="2'-Fluoro-guanosine"
  misc_feature 13: /note="2'-O-Methyluridine"
  misc_feature 14: /note="2'-Fluoro-guanosine"
  misc_feature 15: /note="2'-O-Methylcytidine"
  misc_feature 16: /note="2'- fluoro-uridine"
  misc_feature 17: /note="2'-O-Methylguanosine"
  misc_feature 18: /note="2'-fluoroadenosine"
  misc_feature 19: /note="2'-O-Methyluridine"
  misc_feature 20: /note="2'-Fluoro-guanosine"
  misc_feature 21: /note="2'-O-Methylguanosine"
  misc_feature 22: /note="2'-Fluoro-cytidine"
  misc_feature 23: /note="Inverted DNA thymine"
ccaugugaaaggugcugauggct

SEQ ID NO: 149 - RNA, 21 nt, Artificial Sequence
  Synthetic Construct
  misc_feature 1: /note="2'-Fluoro-guanosine"
  misc_feature 2: /note="2'-Fluoro-cytidine"
  misc_feature 3: /note="2'-O-Methylcytidine"
  misc_feature 4: /note="2'-fluoroadenosine"
  misc_feature 5: /note="2'-O-Methyluridine"
  misc_feature 6: /note="2'-Fluoro-cytidine"
  misc_feature 7: /note="2'-O-Methyladenosine"
  misc_feature 8: /note="2'-Fluoro-guanosine"
  misc_feature 9: /note="2'-O-Methylcytidine"
  misc_feature 10: /note="2'-fluoroadenosine"
  misc_feature 11: /note="2'-O-Methylcytidine"
  misc_feature 12: /note="2'-Fluoro-cytidine"
  misc_feature 13: /note="2'-O-Methyluridine"
  misc_feature 14: /note="2'- fluoro-uridine"
  misc_feature 15: /note="2'-O-Methyluridine"
  misc_feature 16: /note="2'-Fluoro-cytidine"
  misc_feature 17: /note="2'-O-Methyladenosine"
  misc_feature 18: /note="2'-Fluoro-cytidine"
  misc_feature 19: /note="2'-O-Methyladenosine"
  misc_feature 20: /note="DNA thymine"
  misc_feature 21: /note="DNA thymine"
gccaucagcaccuuucacatt

SEQ ID NO: 150 - RNA, 23 nt, Artificial Sequence
  Synthetic Construct
  misc_feature 1: /note="2'-O-Methylcytidine"
  misc_feature 2: /note="2'-O-Methylcytidine"
  misc_feature 3: /note="2'-O-Methyladenosine"
  misc_feature 4: /note="2'-Fluoro-guanosine"
  misc_feature 5: /note="2'-O-Methyluridine"
  misc_feature 6: /note="2'-Fluoro-guanosine"
  misc_feature 7: /note="2'-O-Methyladenosine"
  misc_feature 8: /note="2'-fluoroadenosine"
  misc_feature 9: /note="2'-O-Methyladenosine"
  misc_feature 10: /note="2'-Fluoro-guanosine"
  misc_feature 11: /note="2'-O-Methylguanosine"
  misc_feature 12: /note="2'- fluoro-uridine"
  misc_feature 13: /note="2'-O-Methylguanosine"
  misc_feature 14: /note="2'-Fluoro-cytidine"
  misc_feature 15: /note="2'-O-Methyluridine"
  misc_feature 16: /note="2'-Fluoro-guanosine"
  misc_feature 17: /note="2'-O-Methyladenosine"
  misc_feature 18: /note="2'- fluoro-uridine"
  misc_feature 19: /note="2'-O-Methylguanosine"
  misc_feature 20: /note="2'-Fluoro-guanosine"
  misc_feature 21: /note="2'-O-Methylcytidine"
  misc_feature 22: /note="2'-Fluoro-cytidine"
  misc_feature 23: /note="Inverted DNA thymine"
ccagugaaaggugcugauggcct

SEQ ID NO: 151 - RNA, 21 nt, Artificial Sequence
  Synthetic Construct
  misc_feature 1: /note="2'-Fluoro-guanosine"
  misc_feature 2: /note="2'-Fluoro-guanosine"
  misc_feature 3: /note="2'-O-Methylcytidine"
  misc_feature 4: /note="2'-Fluoro-cytidine"
  misc_feature 5: /note="2'-O-Methyladenosine"
  misc_feature 6: /note="2'- fluoro-uridine"
  misc_feature 7: /note="2'-O-Methylcytidine"
  misc_feature 8: /note="2'-fluoroadenosine"
  misc_feature 9: /note="2'-O-Methylguanosine"
  misc_feature 10: /note="2'-Fluoro-cytidine"
  misc_feature 11: /note="2'-O-Methyladenosine"
  misc_feature 12: /note="2'-Fluoro-cytidine"
  misc_feature 13: /note="2'-O-Methylcytidine"
  misc_feature 14: /note="2'- fluoro-uridine"
  misc_feature 15: /note="2'-O-Methyluridine"
  misc_feature 16: /note="2'- fluoro-uridine"
  misc_feature 17: /note="2'-O-Methylcytidine"
  misc_feature 18: /note="2'-fluoroadenosine"
  misc_feature 19: /note="2'-O-Methylcytidine"
  misc_feature 20: /note="DNA thymine"
  misc_feature 21: /note="DNA thymine"
ggccaucagcaccuuucactt

SEQ ID NO: 152 - RNA, 23 nt, Artificial Sequence
  Synthetic Construct
  misc_feature 1: /note="2'-O-Methylcytidine"
  misc_feature 2: /note="2'-O-Methylcytidine"
  misc_feature 3: /note="2'-O-Methyladenosine"
  misc_feature 4: /note="2'-Fluoro-guanosine"
  misc_feature 5: /note="2'-O-Methylcytidine"
  misc_feature 6: /note="2'- fluoro-uridine"
  misc_feature 7: /note="2'-O-Methylguanosine"
  misc_feature 8: /note="2'- fluoro-uridine"
  misc_feature 9: /note="2'-O-Methylguanosine"
  misc_feature 10: /note="2'-Fluoro-cytidine"
  misc_feature 11: /note="2'-O-Methylcytidine"
  misc_feature 12: /note="2'- fluoro-uridine"
  misc_feature 13: /note="2'-O-Methyluridine"
  misc_feature 14: /note="2'-Fluoro-guanosine"
  misc_feature 15: /note="2'-O-Methylguanosine"
  misc_feature 16: /note="2'- fluoro-uridine"
  misc_feature 17: /note="2'-O-Methyluridine"
  misc_feature 18: /note="2'- fluoro-uridine"
  misc_feature 19: /note="2'-O-Methylcytidine"
  misc_feature 20: /note="2'-Fluoro-cytidine"
  misc_feature 21: /note="2'-O-Methyluridine"
  misc_feature 22: /note="2'-Fluoro-guanosine"
  misc_feature 23: /note="Inverted DNA thymine"
ccagcugugccuugguuuccugt

SEQ ID NO: 153 - RNA, 21 nt, Artificial Sequence
  Synthetic Construct
  misc_feature 1: /note="2'-Fluoro-cytidine"
  misc_feature 2: /note="2'-fluoroadenosine"
  misc_feature 3: /note="2'-O-Methylguanosine"
  misc_feature 4: /note="2'-Fluoro-guanosine"
  misc_feature 5: /note="2'-O-Methyladenosine"
  misc_feature 6: /note="2'-fluoroadenosine"
  misc_feature 7: /note="2'-O-Methyladenosine"
  misc_feature 8: /note="2'-Fluoro-cytidine"
  misc_feature 9: /note="2'-O-Methylcytidine"
  misc_feature 10: /note="2'-fluoroadenosine"
  misc_feature 11: /note="2'-O-Methyladenosine"
  misc_feature 12: /note="2'-Fluoro-guanosine"
  misc_feature 13: /note="2'-O-Methylguanosine"
  misc_feature 14: /note="2'-Fluoro-cytidine"
  misc_feature 15: /note="2'-O-Methyladenosine"
  misc_feature 16: /note="2'-Fluoro-cytidine"
  misc_feature 17: /note="2'-O-Methyladenosine"
  misc_feature 18: /note="2'-Fluoro-guanosine"
  misc_feature 19: /note="2'-O-Methylcytidine"
  misc_feature 20: /note="DNA thymine"
  misc_feature 21: /note="DNA thymine"
caggaaaccaaggcacagctt

SEQ ID NO: 154 - RNA, 23 nt, Artificial Sequence
  Synthetic Construct
  misc_feature 1: /note="2'-O-Methylcytidine"
  misc_feature 2: /note="2'-O-Methylcytidine"
  misc_feature 3: /note="2'-O-Methyladenosine"
  misc_feature 4: /note="2'- fluoro-uridine"
  misc_feature 5: /note="2'-O-Methylguanosine"
  misc_feature 6: /note="2'- fluoro-uridine"
  misc_feature 7: /note="2'-O-Methylguanosine"
  misc_feature 8: /note="2'-Fluoro-cytidine"
  misc_feature 9: /note="2'-O-Methylcytidine"
  misc_feature 10: /note="2'- fluoro-uridine"
  misc_feature 11: /note="2'-O-Methyluridine"
  misc_feature 12: /note="2'-Fluoro-guanosine"
  misc_feature 13: /note="2'-O-Methylguanosine"
  misc_feature 14: /note="2'- fluoro-uridine"
  misc_feature 15: /note="2'-O-Methyluridine"
  misc_feature 16: /note="2'- fluoro-uridine"
  misc_feature 17: /note="2'-O-Methylcytidine"
  misc_feature 18: /note="2'-Fluoro-cytidine"
  misc_feature 19: /note="2'-O-Methyluridine"
  misc_feature 20: /note="2'-Fluoro-guanosine"
  misc_feature 21: /note="2'-O-Methyladenosine"
  misc_feature 22: /note="2'-Fluoro-guanosine"
  misc_feature 23: /note="Inverted DNA thymine"
ccaugugccuugguuuccugagt

SEQ ID NO: 155 - RNA, 21 nt, Artificial Sequence
  Synthetic Construct
  misc_feature 1: /note="2'-Fluoro-cytidine"
  misc_feature 2: /note="2'- fluoro-uridine"
  misc_feature 3: /note="2'-O-Methylcytidine"
  misc_feature 4: /note="2'-fluoroadenosine"
  misc_feature 5: /note="2'-O-Methylguanosine"
  misc_feature 6: /note="2'-Fluoro-guanosine"
  misc_feature 7: /note="2'-O-Methyladenosine"
  misc_feature 8: /note="2'-fluoroadenosine"
  misc_feature 9: /note="2'-O-Methyladenosine"
  misc_feature 10: /note="2'-Fluoro-cytidine"
  misc_feature 11: /note="2'-O-Methylcytidine"
  misc_feature 12: /note="2'-fluoroadenosine"
  misc_feature 13: /note="2'-O-Methyladenosine"
  misc_feature 14: /note="2'-Fluoro-guanosine"
  misc_feature 15: /note="2'-O-Methylguanosine"
  misc_feature 16: /note="2'-Fluoro-cytidine"
  misc_feature 17: /note="2'-O-Methyladenosine"
  misc_feature 18: /note="2'-Fluoro-cytidine"
  misc_feature 19: /note="2'-O-Methyladenosine"
  misc_feature 20: /note="DNA thymine"
  misc_feature 21: /note="DNA thymine"
cucaggaaaccaaggcacatt

SEQ ID NO: 156 - RNA, 23 nt, Artificial Sequence
  Synthetic Construct
  misc_feature 1: /note="2'-O-Methylcytidine"
  misc_feature 2: /note="2'-O-Methylcytidine"
  misc_feature 3: /note="2'-O-Methyladenosine"
  misc_feature 4: /note="2'-fluoroadenosine"
  misc_feature 5: /note="2'-O-Methyladenosine"
  misc_feature 6: /note="2'-Fluoro-cytidine"
  misc_feature 7: /note="2'-O-Methyladenosine"
  misc_feature 8: /note="2'-Fluoro-cytidine"
  misc_feature 9: /note="2'-O-Methylcytidine"
  misc_feature 10: /note="2'-Fluoro-cytidine"
  misc_feature 11: /note="2'-O-Methyladenosine"
  misc_feature 12: /note="2'-fluoroadenosine"
  misc_feature 13: /note="2'-O-Methyladenosine"
  misc_feature 14: /note="2'-Fluoro-guanosine"
  misc_feature 15: /note="2'-O-Methylguanosine"
  misc_feature 16: /note="2'- fluoro-uridine"
  misc_feature 17: /note="2'-O-Methylguanosine"
  misc_feature 18: /note="2'-Fluoro-guanosine"
  misc_feature 19: /note="2'-O-Methylcytidine"
  misc_feature 20: /note="2'-Fluoro-cytidine"
  misc_feature 21: /note="2'-O-Methyluridine"
  misc_feature 22: /note="2'-Fluoro-guanosine"
  misc_feature 23: /note="Inverted DNA thymine"
ccaaacacccaaagguggccugt

SEQ ID NO: 157 - RNA, 21 nt, Artificial Sequence
  Synthetic Construct
  misc_feature 1: /note="2'-Fluoro-cytidine"
  misc_feature 2: /note="2'-fluoroadenosine"
  misc_feature 3: /note="2'-O-Methylguanosine"
  misc_feature 4: /note="2'-Fluoro-guanosine"
  misc_feature 5: /note="2'-O-Methylcytidine"
  misc_feature 6: /note="2'-Fluoro-cytidine"
  misc_feature 7: /note="2'-O-Methyladenosine"
  misc_feature 8: /note="2'-Fluoro-cytidine"
  misc_feature 9: /note="2'-O-Methylcytidine"
  misc_feature 10: /note="2'- fluoro-uridine"
  misc_feature 11: /note="2'-O-Methyluridine"
  misc_feature 12: /note="2'- fluoro-uridine"
  misc_feature 13: /note="2'-O-Methylguanosine"
  misc_feature 14: /note="2'-Fluoro-guanosine"
  misc_feature 15: /note="2'-O-Methylguanosine"
  misc_feature 16: /note="2'- fluoro-uridine"
  misc_feature 17: /note="2'-O-Methylguanosine"
  misc_feature 18: /note="2'- fluoro-uridine"
  misc_feature 19: /note="2'-O-Methyluridine"
  misc_feature 20: /note="DNA thymine"
  misc_feature 21: /note="DNA thymine"
caggccaccuuuggguguutt

SEQ ID NO: 158 - RNA, 23 nt, Artificial Sequence
  Synthetic Construct
  misc_feature 1: /note="2'-O-Methylcytidine"
  misc_feature 2: /note="2'-O-Methylcytidine"
  misc_feature 3: /note="2'-O-Methyladenosine"
  misc_feature 4: /note="2'-fluoroadenosine"
  misc_feature 5: /note="2'-O-Methylcytidine"
  misc_feature 6: /note="2'-fluoroadenosine"
  misc_feature 7: /note="2'-O-Methylcytidine"
  misc_feature 8: /note="2'-Fluoro-cytidine"
  misc_feature 9: /note="2'-O-Methylcytidine"
  misc_feature 10: /note="2'-fluoroadenosine"
  misc_feature 11: /note="2'-O-Methyladenosine"
  misc_feature 12: /note="2'-fluoroadenosine"
  misc_feature 13: /note="2'-O-Methylguanosine"
  misc_feature 14: /note="2'-Fluoro-guanosine"
  misc_feature 15: /note="2'-O-Methyluridine"
  misc_feature 16: /note="2'-Fluoro-guanosine"
  misc_feature 17: /note="2'-O-Methylguanosine"
  misc_feature 18: /note="2'-Fluoro-cytidine"
  misc_feature 19: /note="2'-O-Methylcytidine"
  misc_feature 20: /note="2'- fluoro-uridine"
  misc_feature 21: /note="2'-O-Methylguanosine"
  misc_feature 22: /note="2'-Fluoro-cytidine"
  misc_feature 23: /note="Inverted DNA thymine"
ccaacacccaaagguggccugct

SEQ ID NO: 159 - RNA, 21 nt, Artificial Sequence
  Synthetic Construct
  misc_feature 1: /note="2'-Fluoro-guanosine"
  misc_feature 2: /note="2'-Fluoro-cytidine"
  misc_feature 3: /note="2'-O-Methyladenosine"
  misc_feature 4: /note="2'-Fluoro-guanosine"
  misc_feature 5: /note="2'-O-Methylguanosine"
  misc_feature 6: /note="2'-Fluoro-cytidine"
  misc_feature 7: /note="2'-O-Methylcytidine"
  misc_feature 8: /note="2'-fluoroadenosine"
  misc_feature 9: /note="2'-O-Methylcytidine"
  misc_feature 10: /note="2'-Fluoro-cytidine"
  misc_feature 11: /note="2'-O-Methyluridine"
  misc_feature 12: /note="2'- fluoro-uridine"
  misc_feature 13: /note="2'-O-Methyluridine"
  misc_feature 14: /note="2'-Fluoro-guanosine"
  misc_feature 15: /note="2'-O-Methylguanosine"
  misc_feature 16: /note="2'-Fluoro-guanosine"
  misc_feature 17: /note="2'-O-Methyluridine"
  misc_feature 18: /note="2'-Fluoro-guanosine"
  misc_feature 19: /note="2'-O-Methyluridine"
  misc_feature 20: /note="DNA thymine"
  misc_feature 21: /note="DNA thymine"
gcaggccaccuuugggugutt

SEQ ID NO: 160 - RNA, 23 nt, Artificial Sequence
  Synthetic Construct
  misc_feature 1: /note="2'-O-Methylcytidine"
  misc_feature 2: /note="2'-O-Methylcytidine"
  misc_feature 3: /note="2'-O-Methyladenosine"
  misc_feature 4: /note="2'-Fluoro-guanosine"
  misc_feature 5: /note="2'-O-Methyladenosine"
  misc_feature 6: /note="2'-fluoroadenosine"
  misc_feature 7: /note="2'-O-Methylguanosine"
  misc_feature 8: /note="2'-fluoroadenosine"
  misc_feature 9: /note="2'-O-Methyladenosine"
  misc_feature 10: /note="2'-fluoroadenosine"
  misc_feature 11: /note="2'-O-Methylcytidine"
  misc_feature 12: /note="2'-Fluoro-cytidine"
  misc_feature 13: /note="2'-O-Methyluridine"
  misc_feature 14: /note="2'-Fluoro-guanosine"
  misc_feature 15: /note="2'-O-Methylguanosine"
  misc_feature 16: /note="2'-fluoroadenosine"
  misc_feature 17: /note="2'-O-Methyladenosine"
  misc_feature 18: /note="2'-Fluoro-cytidine"
  misc_feature 19: /note="2'-O-Methylcytidine"
  misc_feature 20: /note="2'-fluoroadenosine"
  misc_feature 21: /note="2'-O-Methylguanosine"
  misc_feature 22: /note="2'-fluoroadenosine"
  misc_feature 23: /note="Inverted DNA thymine"
ccagaagaaaccuggaaccagat

SEQ ID NO: 161 - RNA, 21 nt, Artificial Sequence
  Synthetic Construct
  misc_feature 1: /note="2'- fluoro-uridine"
  misc_feature 2: /note="2'-Fluoro-cytidine"
  misc_feature 3: /note="2'-O-Methyluridine"
  misc_feature 4: /note="2'-Fluoro-guanosine"
  misc_feature 5: /note="2'-O-Methylguanosine"
  misc_feature 6: /note="2'- fluoro-uridine"
  misc_feature 7: /note="2'-O-Methyluridine"
  misc_feature 8: /note="2'-Fluoro-cytidine"
  misc_feature 9: /note="2'-O-Methylcytidine"
  misc_feature 10: /note="2'-fluoroadenosine"
  misc_feature 11: /note="2'-O-Methylguanosine"
  misc_feature 12: /note="2'-Fluoro-guanosine"
  misc_feature 13: /note="2'-O-Methyluridine"
  misc_feature 14: /note="2'- fluoro-uridine"
  misc_feature 15: /note="2'-O-Methyluridine"
  misc_feature 16: /note="2'-Fluoro-cytidine"
  misc_feature 17: /note="2'-O-Methyluridine"
  misc_feature 18: /note="2'- fluoro-uridine"
  misc_feature 19: /note="2'-O-Methylcytidine"
  misc_feature 20: /note="DNA thymine"
  misc_feature 21: /note="DNA thymine"
ucugguuccagguuucuuctt

SEQ ID NO: 162 - RNA, 23 nt, Artificial Sequence
  Synthetic Construct
  misc_feature 23: /note="Inverted DNA thymine"
ccauuguagcauuuuuauuaaut

SEQ ID NO: 163 - RNA, 21 nt, Artificial Sequence
  Synthetic Construct
  misc_feature 20: /note="DNA thymine"
  misc_feature 21: /note="DNA thymine"
auuaauaaaaaugcuacaatt

SEQ ID NO: 164 - RNA, 23 nt, Artificial Sequence
  Synthetic Construct
  misc_feature 23: /note="Inverted DNA thymine"
ccauguagcauuuuuauuaauat

SEQ ID NO: 165 - RNA, 21 nt, Artificial Sequence
  Synthetic Construct
  misc_feature 20: /note="DNA thymine"
  misc_feature 21: /note="DNA thymine"
uauuaauaaaaaugcuacatt

SEQ ID NO: 166 - RNA, 23 nt, Artificial Sequence
  Synthetic Construct
  misc_feature 23: /note="Inverted DNA thymine"
ccaguagcauuuuuauuaauaut

SEQ ID NO: 167 - RNA, 21 nt, Artificial Sequence
  Synthetic Construct
  misc_feature 20: /note="DNA thymine"
  misc_feature 21: /note="DNA thymine"
auauuaauaaaaaugcuactt

SEQ ID NO: 168 - RNA, 23 nt, Artificial Sequence
  Synthetic Construct
  misc_feature 23: /note="Inverted DNA thymine"
ccauagcauuuuuauuaauaugt

SEQ ID NO: 169 - RNA, 21 nt, Artificial Sequence
  Synthetic Construct
  misc_feature 20: /note="DNA thymine"
  misc_feature 21: /note="DNA thymine"
cauauuaauaaaaaugcuatt

SEQ ID NO: 170 - RNA, 23 nt, Artificial Sequence
  Synthetic Construct
  misc_feature 23: /note="Inverted DNA thymine"
ccaagcauuuuuauuaauauggt

SEQ ID NO: 171 - RNA, 21 nt, Artificial Sequence
  Synthetic Construct
  misc_feature 20: /note="DNA thymine"
  misc_feature 21: /note="DNA thymine"
ccauauuaauaaaaaugcutt

SEQ ID NO: 172 - RNA, 23 nt, Artificial Sequence
  Synthetic Construct
  misc_feature 23: /note="Inverted DNA thymine"
ccagcauuuuuauuaauauggut

SEQ ID NO: 173 - RNA, 21 nt, Artificial Sequence
  Synthetic Construct
  misc_feature 20: /note="DNA thymine"
  misc_feature 21: /note="DNA thymine"
accauauuaauaaaaaugctt

SEQ ID NO: 174 - RNA, 23 nt, Artificial Sequence
  Synthetic Construct
  misc_feature 23: /note="Inverted DNA thymine"
ccauuuuuauuaauauggugact

SEQ ID NO: 175 - RNA, 21 nt, Artificial Sequence
  Synthetic Construct
  misc_feature 20: /note="DNA thymine"
  misc_feature 21: /note="DNA thymine"
gucaccauauuaauaaaaatt

SEQ ID NO: 176 - RNA, 23 nt, Artificial Sequence
  Synthetic Construct
  misc_feature 23: /note="Inverted DNA thymine"
ccauuuuauuaauauggugacut

SEQ ID NO: 177 - RNA, 21 nt, Artificial Sequence
  Synthetic Construct
  misc_feature 20: /note="DNA thymine"
  misc_feature 21: /note="DNA thymine"
agucaccauauuaauaaaatt

SEQ ID NO: 178 - RNA, 23 nt, Artificial Sequence
  Synthetic Construct
  misc_feature 23: /note="Inverted DNA thymine"
ccauuuauuaauauggugacuut

SEQ ID NO: 179 - RNA, 21 nt, Artificial Sequence
  Synthetic Construct
  misc_feature 20: /note="DNA thymine"
  misc_feature 21: /note="DNA thymine"
aagucaccauauuaauaaatt

SEQ ID NO: 180 - RNA, 23 nt, Artificial Sequence
  Synthetic Construct
  misc_feature 23: /note="Inverted DNA thymine"
ccauauuaauauggugacuuuut

SEQ ID NO: 181 - RNA, 21 nt, Artificial Sequence
  Synthetic Construct
  misc_feature 20: /note="DNA thymine"
  misc_feature 21: /note="DNA thymine"
aaaagucaccauauuaauatt

SEQ ID NO: 182 - RNA, 23 nt, Artificial Sequence
  Synthetic Construct
  misc_feature 23: /note="Inverted DNA thymine"
ccaauuaauauggugacuuuuut

SEQ ID NO: 183 - RNA, 21 nt, Artificial Sequence
  Synthetic Construct
  misc_feature 20: /note="DNA thymine"
  misc_feature 21: /note="DNA thymine"
aaaaagucaccauauuaautt

SEQ ID NO: 184 - RNA, 23 nt, Artificial Sequence
  Synthetic Construct
  misc_feature 23: /note="Inverted DNA thymine"
ccauuaauauggugacuuuuuat

SEQ ID NO: 185 - RNA, 21 nt, Artificial Sequence
  Synthetic Construct
  misc_feature 20: /note="DNA thymine"
  misc_feature 21: /note="DNA thymine"
uaaaaagucaccauauuaatt

SEQ ID NO: 186 - RNA, 23 nt, Artificial Sequence
  Synthetic Construct
  misc_feature 23: /note="Inverted DNA thymine"
ccauaauauggugacuuuuuaat

SEQ ID NO: 187 - RNA, 21 nt, Artificial Sequence
  Synthetic Construct
  misc_feature 20: /note="DNA thymine"
  misc_feature 21: /note="DNA thymine"
uuaaaaagucaccauauuatt

SEQ ID NO: 188 - RNA, 23 nt, Artificial Sequence
  Synthetic Construct
  misc_feature 23: /note="Inverted DNA thymine"
ccauauggugacuuuuuaaaaut

SEQ ID NO: 189 - RNA, 21 nt, Artificial Sequence
  Synthetic Construct
  misc_feature 20: /note="DNA thymine"
  misc_feature 21: /note="DNA thymine"
auuuuaaaaagucaccauatt

SEQ ID NO: 190 - RNA, 23 nt, Artificial Sequence
  Synthetic Construct
  misc_feature 23: /note="Inverted DNA thymine"
ccaggcucugguggcgugaucut

SEQ ID NO: 191 - RNA, 21 nt, Artificial Sequence
  Synthetic Construct
  misc_feature 20: /note="DNA thymine"
  misc_feature 21: /note="DNA thymine"
agaucacgccaccagagcctt

SEQ ID NO: 192 - RNA, 23 nt, Artificial Sequence
  Synthetic Construct
  misc_feature 23: /note="Inverted DNA thymine"
ccagcucugguggcgugaucugt

SEQ ID NO: 193 - RNA, 21 nt, Artificial Sequence
  Synthetic Construct
  misc_feature 20: /note="DNA thymine"
  misc_feature 21: /note="DNA thymine"
cagaucacgccaccagagctt

SEQ ID NO: 194 - RNA, 23 nt, Artificial Sequence
  Synthetic Construct
  misc_feature 23: /note="Inverted DNA thymine"
ccacucugguggcgugaucugct

SEQ ID NO: 195 - RNA, 21 nt, Artificial Sequence
  Synthetic Construct
  misc_feature 20: /note="DNA thymine"
  misc_feature 21: /note="DNA thymine"
gcagaucacgccaccagagtt

SEQ ID NO: 196 - RNA, 23 nt, Artificial Sequence
  Synthetic Construct
  misc_feature 23: /note="Inverted DNA thymine"
ccaucugguggcgugaucugcgt

SEQ ID NO: 197 - RNA, 21 nt, Artificial Sequence
  Synthetic Construct
  misc_feature 20: /note="DNA thymine"
  misc_feature 21: /note="DNA thymine"
cgcagaucacgccaccagatt

SEQ ID NO: 198 - RNA, 23 nt, Artificial Sequence
  Synthetic Construct
  misc_feature 23: /note="Inverted DNA thymine"
ccacaggcgucaagcacccacat

SEQ ID NO: 199 - RNA, 21 nt, Artificial Sequence
  Synthetic Construct
  misc_feature 20: /note="DNA thymine"
  misc_feature 21: /note="DNA thymine"
ugugggugcuugacgccugtt

SEQ ID NO: 200 - RNA, 23 nt, Artificial Sequence
  Synthetic Construct
  misc_feature 23: /note="Inverted DNA thymine"
ccaaggcgucaagcacccacact

SEQ ID NO: 201 - RNA, 21 nt, Artificial Sequence
  Synthetic Construct
  misc_feature 20: /note="DNA thymine"
  misc_feature 21: /note="DNA thymine"
gugugggugcuugacgccutt

SEQ ID NO: 202 - RNA, 23 nt, Artificial Sequence
  Synthetic Construct
  misc_feature 23: /note="Inverted DNA thymine"
ccacgucaagcacccacacccut

SEQ ID NO: 203 - RNA, 21 nt, Artificial Sequence
  Synthetic Construct
  misc_feature 20: /note="DNA thymine"
  misc_feature 21: /note="DNA thymine"
agggugugggugcuugacgtt

SEQ ID NO: 204 - RNA, 23 nt, Artificial Sequence
  Synthetic Construct
  misc_feature 23: /note="Inverted DNA thymine"
ccagucaagcacccacacccuat

SEQ ID NO: 205 - RNA, 21 nt, Artificial Sequence
  Synthetic Construct
  misc_feature 20: /note="DNA thymine"
  misc_feature 21: /note="DNA thymine"
uagggugugggugcuugactt

SEQ ID NO: 206 - RNA, 23 nt, Artificial Sequence
  Synthetic Construct
  misc_feature 23: /note="Inverted DNA thymine"
ccaucaagcacccacacccuagt

SEQ ID NO: 207 - RNA, 21 nt, Artificial Sequence
  Synthetic Construct
  misc_feature 20: /note="DNA thymine"
  misc_feature 21: /note="DNA thymine"
cuagggugugggugcuugatt

SEQ ID NO: 208 - RNA, 23 nt, Artificial Sequence
  Synthetic Construct
  misc_feature 23: /note="Inverted DNA thymine"
ccacaagcacccacacccuagat

SEQ ID NO: 209 - RNA, 21 nt, Artificial Sequence
  Synthetic Construct
  misc_feature 20: /note="DNA thymine"
  misc_feature 21: /note="DNA thymine"
ucuagggugugggugcuugtt

SEQ ID NO: 210 - RNA, 23 nt, Artificial Sequence
  Synthetic Construct
  misc_feature 23: /note="Inverted DNA thymine"
ccaaagcacccacacccuagaat

SEQ ID NO: 211 - RNA, 21 nt, Artificial Sequence
  Synthetic Construct
  misc_feature 20: /note="DNA thymine"
  misc_feature 21: /note="DNA thymine"
uucuagggugugggugcuutt

SEQ ID NO: 212 - RNA, 23 nt, Artificial Sequence
  Synthetic Construct
  misc_feature 23: /note="Inverted DNA thymine"
ccaagcacccacacccuagaagt

SEQ ID NO: 213 - RNA, 21 nt, Artificial Sequence
  Synthetic Construct
  misc_feature 20: /note="DNA thymine"
  misc_feature 21: /note="DNA thymine"
cuucuagggugugggugcutt

SEQ ID NO: 214 - RNA, 23 nt, Artificial Sequence
  Synthetic Construct
  misc_feature 23: /note="Inverted DNA thymine"
ccagcacccacacccuagaaggt

SEQ ID NO: 215 - RNA, 21 nt, Artificial Sequence
  Synthetic Construct
  misc_feature 20: /note="DNA thymine"
  misc_feature 21: /note="DNA thymine"
ccuucuagggugugggugctt

SEQ ID NO: 216 - RNA, 23 nt, Artificial Sequence
  Synthetic Construct
  misc_feature 23: /note="Inverted DNA thymine"
ccacacccacacccuagaaggut

SEQ ID NO: 217 - RNA, 21 nt, Artificial Sequence
  Synthetic Construct
  misc_feature 20: /note="DNA thymine"
  misc_feature 21: /note="DNA thymine"
accuucuagggugugggugtt

SEQ ID NO: 218 - RNA, 23 nt, Artificial Sequence
  Synthetic Construct
  misc_feature 23: /note="Inverted DNA thymine"
ccaacccacacccuagaagguut

SEQ ID NO: 219 - RNA, 21 nt, Artificial Sequence
  Synthetic Construct
  misc_feature 20: /note="DNA thymine"
  misc_feature 21: /note="DNA thymine"
aaccuucuagggugugggutt

SEQ ID NO: 220 - RNA, 23 nt, Artificial Sequence
  Synthetic Construct
  misc_feature 23: /note="Inverted DNA thymine"
ccacccacacccuagaagguuut

SEQ ID NO: 221 - RNA, 21 nt, Artificial Sequence
  Synthetic Construct
  misc_feature 20: /note="DNA thymine"
  misc_feature 21: /note="DNA thymine"
aaaccuucuagggugugggtt

SEQ ID NO: 222 - RNA, 23 nt, Artificial Sequence
  Synthetic Construct
  misc_feature 23: /note="Inverted DNA thymine"
ccaccacacccuagaagguuuct

SEQ ID NO: 223 - RNA, 21 nt, Artificial Sequence
  Synthetic Construct
  misc_feature 20: /note="DNA thymine"
  misc_feature 21: /note="DNA thymine"
gaaaccuucuaggguguggtt

SEQ ID NO: 224 - RNA, 23 nt, Artificial Sequence
  Synthetic Construct
  misc_feature 23: /note="Inverted DNA thymine"
ccacacacccuagaagguuucct

SEQ ID NO: 225 - RNA, 21 nt, Artificial Sequence
  Synthetic Construct
  misc_feature 20: /note="DNA thymine"
  misc_feature 21: /note="DNA thymine"
ggaaaccuucuagggugugtt

SEQ ID NO: 226 - RNA, 23 nt, Artificial Sequence
  Synthetic Construct
  misc_feature 23: /note="Inverted DNA thymine"
ccaacacccuagaagguuuccgt

SEQ ID NO: 227 - RNA, 21 nt, Artificial Sequence
  Synthetic Construct
  misc_feature 20: /note="DNA thymine"
  misc_feature 21: /note="DNA thymine"
cggaaaccuucuagggugutt

SEQ ID NO: 228 - RNA, 23 nt, Artificial Sequence
  Synthetic Construct
  misc_feature 23: /note="Inverted DNA thymine"
ccacacccuagaagguuuccgct

SEQ ID NO: 229 - RNA, 21 nt, Artificial Sequence
  Synthetic Construct
  misc_feature 20: /note="DNA thymine"
  misc_feature 21: /note="DNA thymine"
gcggaaaccuucuagggugtt

SEQ ID NO: 230 - RNA, 23 nt, Artificial Sequence
  Synthetic Construct
  misc_feature 23: /note="Inverted DNA thymine"
ccaacccuagaagguuuccgcat

SEQ ID NO: 231 - RNA, 21 nt, Artificial Sequence
  Synthetic Construct
  misc_feature 20: /note="DNA thymine"
  misc_feature 21: /note="DNA thymine"
ugcggaaaccuucuagggutt

SEQ ID NO: 232 - RNA, 23 nt, Artificial Sequence
  Synthetic Construct
  misc_feature 23: /note="Inverted DNA thymine"
ccacccuagaagguuuccgcagt

SEQ ID NO: 233 - RNA, 21 nt, Artificial Sequence
  Synthetic Construct
  misc_feature 20: /note="DNA thymine"
  misc_feature 21: /note="DNA thymine"
cugcggaaaccuucuagggtt

SEQ ID NO: 234 - RNA, 23 nt, Artificial Sequence
  Synthetic Construct
  misc_feature 23: /note="Inverted DNA thymine"
ccaccuagaagguuuccgcagct

SEQ ID NO: 235 - RNA, 21 nt, Artificial Sequence
  Synthetic Construct
  misc_feature 20: /note="DNA thymine"
  misc_feature 21: /note="DNA thymine"
gcugcggaaaccuucuaggtt

SEQ ID NO: 236 - RNA, 23 nt, Artificial Sequence
  Synthetic Construct
  misc_feature 23: /note="Inverted DNA thymine"
ccacuagaagguuuccgcagcgt

SEQ ID NO: 237 - RNA, 21 nt, Artificial Sequence
  Synthetic Construct
  misc_feature 20: /note="DNA thymine"
  misc_feature 21: /note="DNA thymine"
cgcugcggaaaccuucuagtt

SEQ ID NO: 238 - RNA, 23 nt, Artificial Sequence
  Synthetic Construct
  misc_feature 23: /note="Inverted DNA thymine"
ccauagaagguuuccgcagcgat

SEQ ID NO: 239 - RNA, 21 nt, Artificial Sequence
  Synthetic Construct
  misc_feature 20: /note="DNA thymine"
  misc_feature 21: /note="DNA thymine"
ucgcugcggaaaccuucuatt

SEQ ID NO: 240 - RNA, 23 nt, Artificial Sequence
  Synthetic Construct
  misc_feature 23: /note="Inverted DNA thymine"
ccaagaagguuuccgcagcgact

SEQ ID NO: 241 - RNA, 21 nt, Artificial Sequence
  Synthetic Construct
  misc_feature 20: /note="DNA thymine"
  misc_feature 21: /note="DNA thymine"
gucgcugcggaaaccuucutt

SEQ ID NO: 242 - RNA, 23 nt, Artificial Sequence
  Synthetic Construct
  misc_feature 23: /note="Inverted DNA thymine"
ccagaagguuuccgcagcgacgt

SEQ ID NO: 243 - RNA, 21 nt, Artificial Sequence
  Synthetic Construct
  misc_feature 20: /note="DNA thymine"
  misc_feature 21: /note="DNA thymine"
cgucgcugcggaaaccuuctt

SEQ ID NO: 244 - RNA, 23 nt, Artificial Sequence
  Synthetic Construct
  misc_feature 23: /note="Inverted DNA thymine"
ccaaagguuuccgcagcgacgut

SEQ ID NO: 245 - RNA, 21 nt, Artificial Sequence
  Synthetic Construct
  misc_feature 20: /note="DNA thymine"
  misc_feature 21: /note="DNA thymine"
acgucgcugcggaaaccuutt

SEQ ID NO: 246 - RNA, 23 nt, Artificial Sequence
  Synthetic Construct
  misc_feature 23: /note="Inverted DNA thymine"
ccaagguuuccgcagcgacguct

SEQ ID NO: 247 - RNA, 21 nt, Artificial Sequence
  Synthetic Construct
  misc_feature 20: /note="DNA thymine"
  misc_feature 21: /note="DNA thymine"
gacgucgcugcggaaaccutt

SEQ ID NO: 248 - RNA, 23 nt, Artificial Sequence
  Synthetic Construct
  misc_feature 23: /note="Inverted DNA thymine"
ccaguuuccgcagcgacgucgat

SEQ ID NO: 249 - RNA, 21 nt, Artificial Sequence
  Synthetic Construct
  misc_feature 20: /note="DNA thymine"
  misc_feature 21: /note="DNA thymine"
ucgacgucgcugcggaaactt

SEQ ID NO: 250 - RNA, 23 nt, Artificial Sequence
  Synthetic Construct
  misc_feature 23: /note="Inverted DNA thymine"
ccauuuccgcagcgacgucgagt

SEQ ID NO: 251 - RNA, 21 nt, Artificial Sequence
  Synthetic Construct
  misc_feature 20: /note="DNA thymine"
  misc_feature 21: /note="DNA thymine"
cucgacgucgcugcggaaatt

SEQ ID NO: 252 - RNA, 23 nt, Artificial Sequence
  Synthetic Construct
  misc_feature 23: /note="Inverted DNA thymine"
ccaccugaacuucagcuccugct

SEQ ID NO: 253 - RNA, 21 nt, Artificial Sequence
  Synthetic Construct
  misc_feature 20: /note="DNA thymine"
  misc_feature 21: /note="DNA thymine"
gcaggagcugaaguucaggtt

SEQ ID NO: 254 - RNA, 23 nt, Artificial Sequence
  Synthetic Construct
  misc_feature 23: /note="Inverted DNA thymine"
ccacugaacuucagcuccugcat

SEQ ID NO: 255 - RNA, 21 nt, Artificial Sequence
  Synthetic Construct
  misc_feature 20: /note="DNA thymine"
  misc_feature 21: /note="DNA thymine"
ugcaggagcugaaguucagtt

SEQ ID NO: 256 - RNA, 23 nt, Artificial Sequence
  Synthetic Construct
  misc_feature 23: /note="Inverted DNA thymine"
ccaugaacuucagcuccugcact

SEQ ID NO: 257 - RNA, 21 nt, Artificial Sequence
  Synthetic Construct
  misc_feature 20: /note="DNA thymine"
  misc_feature 21: /note="DNA thymine"
gugcaggagcugaaguucatt

SEQ ID NO: 258 - RNA, 23 nt, Artificial Sequence
  Synthetic Construct
  misc_feature 23: /note="Inverted DNA thymine"
ccaggacagcaaccucuccccut

SEQ ID NO: 259 - RNA, 21 nt, Artificial Sequence
  Synthetic Construct
  misc_feature 20: /note="DNA thymine"
  misc_feature 21: /note="DNA thymine"
aggggagagguugcugucctt

SEQ ID NO: 260 - RNA, 23 nt, Artificial Sequence
  Synthetic Construct
  misc_feature 23: /note="Inverted DNA thymine"
ccagacagcaaccucuccccugt

SEQ ID NO: 261 - RNA, 21 nt, Artificial Sequence
  Synthetic Construct
  misc_feature 20: /note="DNA thymine"
  misc_feature 21: /note="DNA thymine"
caggggagagguugcuguctt

SEQ ID NO: 262 - RNA, 23 nt, Artificial Sequence
  Synthetic Construct
  misc_feature 23: /note="Inverted DNA thymine"
ccaacagcaaccucuccccuggt

SEQ ID NO: 263 - RNA, 21 nt, Artificial Sequence
  Synthetic Construct
  misc_feature 20: /note="DNA thymine"
  misc_feature 21: /note="DNA thymine"
ccaggggagagguugcugutt

SEQ ID NO: 264 - RNA, 23 nt, Artificial Sequence
  Synthetic Construct
  misc_feature 23: /note="Inverted DNA thymine"
ccaaugggcaccgucagcuccat

SEQ ID NO: 265 - RNA, 21 nt, Artificial Sequence
  Synthetic Construct
  misc_feature 20: /note="DNA thymine"
  misc_feature 21: /note="DNA thymine"
uggagcugacggugcccautt

SEQ ID NO: 266 - RNA, 23 nt, Artificial Sequence
  Synthetic Construct
  misc_feature 23: /note="Inverted DNA thymine"
ccaggaugaauaccagcccccct

SEQ ID NO: 267 - RNA, 21 nt, Artificial Sequence
  Synthetic Construct
  misc_feature 20: /note="DNA thymine"
  misc_feature 21: /note="DNA thymine"
ggggggcugguauucaucctt

SEQ ID NO: 268 - RNA, 23 nt, Artificial Sequence
  Synthetic Construct
  misc_feature 23: /note="Inverted DNA thymine"
ccagaugaauaccagccccccgt

SEQ ID NO: 269 - RNA, 21 nt, Artificial Sequence
  Synthetic Construct
  misc_feature 20: /note="DNA thymine"
  misc_feature 21: /note="DNA thymine"
cggggggcugguauucauctt

SEQ ID NO: 270 - RNA, 23 nt, Artificial Sequence
  Synthetic Construct
  misc_feature 23: /note="Inverted DNA thymine"
ccaaugaauaccagccccccgat

SEQ ID NO: 271 - RNA, 21 nt, Artificial Sequence
  Synthetic Construct
  misc_feature 20: /note="DNA thymine"
  misc_feature 21: /note="DNA thymine"
ucggggggcugguauucautt

SEQ ID NO: 272 - RNA, 23 nt, Artificial Sequence
  Synthetic Construct
  misc_feature 23: /note="Inverted DNA thymine"
ccacaagggggcaagcuggucut

SEQ ID NO: 273 - RNA, 21 nt, Artificial Sequence
  Synthetic Construct
  misc_feature 20: /note="DNA thymine"
  misc_feature 21: /note="DNA thymine"
agaccagcuugcccccuugtt

SEQ ID NO: 274 - RNA, 23 nt, Artificial Sequence
  Synthetic Construct
  misc_feature 23: /note="Inverted DNA thymine"
ccaaagggggcaagcuggucugt

SEQ ID NO: 275 - RNA, 21 nt, Artificial Sequence
  Synthetic Construct
  misc_feature 20: /note="DNA thymine"
  misc_feature 21: /note="DNA thymine"
cagaccagcuugcccccuutt

SEQ ID NO: 276 - RNA, 23 nt, Artificial Sequence
  Synthetic Construct
  misc_feature 23: /note="Inverted DNA thymine"
ccauggacccugacuggcugcat

SEQ ID NO: 277 - RNA, 21 nt, Artificial Sequence
  Synthetic Construct
  misc_feature 20: /note="DNA thymine"
  misc_feature 21: /note="DNA thymine"
ugcagccagucaggguccatt

SEQ ID NO: 278 - RNA, 23 nt, Artificial Sequence
  Synthetic Construct
  misc_feature 23: /note="Inverted DNA thymine"
ccagacccugacuggcugcagut

SEQ ID NO: 279 - RNA, 21 nt, Artificial Sequence
  Synthetic Construct
  misc_feature 20: /note="DNA thymine"
  misc_feature 21: /note="DNA thymine"
acugcagccagucaggguctt

SEQ ID NO: 280 - RNA, 23 nt, Artificial Sequence
  Synthetic Construct
  misc_feature 23: /note="Inverted DNA thymine"
ccaugacuggcugcagugcccut

SEQ ID NO: 281 - RNA, 21 nt, Artificial Sequence
  Synthetic Construct
  misc_feature 20: /note="DNA thymine"
  misc_feature 21: /note="DNA thymine"
agggcacugcagccagucatt

SEQ ID NO: 282 - RNA, 23 nt, Artificial Sequence
  Synthetic Construct
  misc_feature 23: /note="Inverted DNA thymine"
ccaucuucccauggauaggggat

SEQ ID NO: 283 - RNA, 21 nt, Artificial Sequence
  Synthetic Construct
  misc_feature 20: /note="DNA thymine"
  misc_feature 21: /note="DNA thymine"
uccccuauccaugggaagatt

SEQ ID NO: 284 - RNA, 23 nt, Artificial Sequence
  Synthetic Construct
  misc_feature 23: /note="Inverted DNA thymine"
ccacuucccauggauaggggagt

SEQ ID NO: 285 - RNA, 21 nt, Artificial Sequence
  Synthetic Construct
  misc_feature 20: /note="DNA thymine"
  misc_feature 21: /note="DNA thymine"
cuccccuauccaugggaagtt

SEQ ID NO: 286 - RNA, 23 nt, Artificial Sequence
  Synthetic Construct
  misc_feature 23: /note="Inverted DNA thymine"
ccauucccauggauaggggaggt

SEQ ID NO: 287 - RNA, 21 nt, Artificial Sequence
  Synthetic Construct
  misc_feature 20: /note="DNA thymine"
  misc_feature 21: /note="DNA thymine"
ccuccccuauccaugggaatt

SEQ ID NO: 288 - RNA, 23 nt, Artificial Sequence
  Synthetic Construct
  misc_feature 23: /note="Inverted DNA thymine"
ccaguaggggcugcagggacaat

SEQ ID NO: 289 - RNA, 21 nt, Artificial Sequence
  Synthetic Construct
  misc_feature 20: /note="DNA thymine"
  misc_feature 21: /note="DNA thymine"
uugucccugcagccccuactt

SEQ ID NO: 290 - RNA, 23 nt, Artificial Sequence
  Synthetic Construct
  misc_feature 23: /note="Inverted DNA thymine"
ccagagugugaaaggugcugaut

SEQ ID NO: 291 - RNA, 21 nt, Artificial Sequence
  Synthetic Construct
  misc_feature 20: /note="DNA thymine"
  misc_feature 21: /note="DNA thymine"
aucagcaccuuucacacuctt

SEQ ID NO: 292 - RNA, 23 nt, Artificial Sequence
  Synthetic Construct
  misc_feature 23: /note="Inverted DNA thymine"
ccaagugugaaaggugcugaugt

SEQ ID NO: 293 - RNA, 21 nt, Artificial Sequence
  Synthetic Construct
  misc_feature 20: /note="DNA thymine"
  misc_feature 21: /note="DNA thymine"
caucagcaccuuucacacutt

SEQ ID NO: 294 - RNA, 23 nt, Artificial Sequence
  Synthetic Construct
  misc_feature 23: /note="Inverted DNA thymine"
ccagugugaaaggugcugauggt

SEQ ID NO: 295 - RNA, 21 nt, Artificial Sequence
  Synthetic Construct
  misc_feature 20: /note="DNA thymine"
  misc_feature 21: /note="DNA thymine"
ccaucagcaccuuucacactt

SEQ ID NO: 296 - RNA, 23 nt, Artificial Sequence
  Synthetic Construct
  misc_feature 23: /note="Inverted DNA thymine"
ccaugugaaaggugcugauggct

SEQ ID NO: 297 - RNA, 21 nt, Artificial Sequence
  Synthetic Construct
  misc_feature 20: /note="DNA thymine"
  misc_feature 21: /note="DNA thymine"
gccaucagcaccuuucacatt

SEQ ID NO: 298 - RNA, 23 nt, Artificial Sequence
  Synthetic Construct
  misc_feature 23: /note="Inverted DNA thymine"
ccagugaaaggugcugauggcct

SEQ ID NO: 299 - RNA, 21 nt, Artificial Sequence
  Synthetic Construct
  misc_feature 20: /note="DNA thymine"
  misc_feature 21: /note="DNA thymine"
ggccaucagcaccuuucactt

SEQ ID NO: 300 - RNA, 23 nt, Artificial Sequence
  Synthetic Construct
  misc_feature 23: /note="Inverted DNA thymine"
ccagcugugccuugguuuccugt

SEQ ID NO: 301 - RNA, 21 nt, Artificial Sequence
  Synthetic Construct
  misc_feature 20: /note="DNA thymine"
  misc_feature 21: /note="DNA thymine"
caggaaaccaaggcacagctt

SEQ ID NO: 302 - RNA, 23 nt, Artificial Sequence
  Synthetic Construct
  misc_feature 23: /note="Inverted DNA thymine"
ccaugugccuugguuuccugagt

SEQ ID NO: 303 - RNA, 21 nt, Artificial Sequence
  Synthetic Construct
  misc_feature 20: /note="DNA thymine"
  misc_feature 21: /note="DNA thymine"
cucaggaaaccaaggcacatt

SEQ ID NO: 304 - RNA, 23 nt, Artificial Sequence
  Synthetic Construct
  misc_feature 23: /note="Inverted DNA thymine"
ccaaacacccaaagguggccugt

SEQ ID NO: 305 - RNA, 21 nt, Artificial Sequence
  Synthetic Construct
  misc_feature 20: /note="DNA thymine"
  misc_feature 21: /note="DNA thymine"
caggccaccuuuggguguutt

SEQ ID NO: 306 - RNA, 23 nt, Artificial Sequence
  Synthetic Construct
  misc_feature 23: /note="Inverted DNA thymine"
ccaacacccaaagguggccugct

SEQ ID NO: 307 - RNA, 21 nt, Artificial Sequence
  Synthetic Construct
  misc_feature 20: /note="DNA thymine"
  misc_feature 21: /note="DNA thymine"
gcaggccaccuuugggugutt

SEQ ID NO: 308 - RNA, 23 nt, Artificial Sequence
  Synthetic Construct
  misc_feature 23: /note="Inverted DNA thymine"
ccagaagaaaccuggaaccagat

SEQ ID NO: 309 - RNA, 21 nt, Artificial Sequence
  Synthetic Construct
ucugguuccagguuucuuctt

SEQ ID NO: 310 - RNA, 19 nt, Artificial Sequence
  Synthetic Construct
uuauuaauauggugacuuu

SEQ ID NO: 311 - RNA, 19 nt, Artificial Sequence
  Synthetic Construct
auauggugacuuuuuaaaa

SEQ ID NO: 312 - RNA, 21 nt, Artificial Sequence
  Synthetic Construct
auuuuuauuaauauggugacu

SEQ ID NO: 313 - RNA, 21 nt, Artificial Sequence
  Synthetic Construct
uuuuauuaauauggugacuuu

SEQ ID NO: 314 - RNA, 21 nt, Artificial Sequence
  Synthetic Construct
uuuauuaauauggugacuuuu

SEQ ID NO: 315 - RNA, 21 nt, Artificial Sequence
  Synthetic Construct
uauuaauauggugacuuuuua

SEQ ID NO: 316 - RNA, 21 nt, Artificial Sequence
  Synthetic Construct
aauauggugacuuuuuaaaau

SEQ ID NO: 317 - RNA, 23 nt, Artificial Sequence
  Synthetic Construct
gcauuuuuauuaauauggugacu

SEQ ID NO: 318 - RNA, 23 nt, Artificial Sequence
  Synthetic Construct
auuuuuauuaauauggugacuuu

SEQ ID NO: 319 - RNA, 23 nt, Artificial Sequence
  Synthetic Construct
uuuuuauuaauauggugacuuuu

SEQ ID NO: 320 - RNA, 23 nt, Artificial Sequence
  Synthetic Construct
uuuauuaauauggugacuuuuua

SEQ ID NO: 321 - RNA, 23 nt, Artificial Sequence
  Synthetic Construct
uuauuaauauggugacuuuuuaa

SEQ ID NO: 322 - RNA, 23 nt, Artificial Sequence
  Synthetic Construct
  misc_feature 23: /note="Inverted DNA thymine"
ccauuauuaauauggugacuuut

SEQ ID NO: 323 - RNA, 21 nt, Artificial Sequence
  Synthetic Construct
  misc_feature 20: /note="DNA thymine"
  misc_feature 21: /note="DNA thymine"
aaagucaccauauuaauaatt

SEQ ID NO: 324 - RNA, 23 nt, Artificial Sequence
  Synthetic Construct
  misc_feature 23: /note="Inverted DNA thymine"
ccaauauggugacuuuuuaaaat

SEQ ID NO: 325 - RNA, 21 nt, Artificial Sequence
  Synthetic Construct
  misc_feature 20: /note="DNA thymine"
  misc_feature 21: /note="DNA thymine"
uuuuaaaaagucaccauautt

SEQ ID NO: 326 - RNA, 25 nt, Artificial Sequence
  Synthetic Construct
  misc_feature 25: /note="Inverted DNA thymine"
ccaauuuuuauuaauauggugacut

SEQ ID NO: 327 - RNA, 23 nt, Artificial Sequence
  Synthetic Construct
  misc_feature 22: /note="DNA thymine"
  misc_feature 23: /note="DNA thymine"
agucaccauauuaauaaaaautt

SEQ ID NO: 328 - RNA, 25 nt, Artificial Sequence
  Synthetic Construct
  misc_feature 25: /note="Inverted DNA thymine"
ccauuuuauuaauauggugacuuut

SEQ ID NO: 329 - RNA, 23 nt, Artificial Sequence
  Synthetic Construct
  misc_feature 22: /note="DNA thymine"
  misc_feature 23: /note="DNA thymine"
aaagucaccauauuaauaaaatt

SEQ ID NO: 330 - RNA, 25 nt, Artificial Sequence
  Synthetic Construct
  misc_feature 25: /note="Inverted DNA thymine"
ccauuuauuaauauggugacuuuut

SEQ ID NO: 331 - RNA, 23 nt, Artificial Sequence
  Synthetic Construct
  misc_feature 22: /note="DNA thymine"
  misc_feature 23: /note="DNA thymine"
aaaagucaccauauuaauaaatt

SEQ ID NO: 332 - RNA, 25 nt, Artificial Sequence
  Synthetic Construct
  misc_feature 25: /note="Inverted DNA thymine"
ccauauuaauauggugacuuuuuat

SEQ ID NO: 333 - RNA, 23 nt, Artificial Sequence
  Synthetic Construct
  misc_feature 22: /note="DNA thymine"
  misc_feature 23: /note="DNA thymine"
uaaaaagucaccauauuaauatt

SEQ ID NO: 334 - RNA, 25 nt, Artificial Sequence
  Synthetic Construct
  misc_feature 25: /note="Inverted DNA thymine"
ccaaauauggugacuuuuuaaaaut

SEQ ID NO: 335 - RNA, 23 nt, Artificial Sequence
  Synthetic Construct
  misc_feature 22: /note="DNA thymine"
  misc_feature 23: /note="DNA thymine"
auuuuaaaaagucaccauauutt

SEQ ID NO: 336 - RNA, 27 nt, Artificial Sequence
  Synthetic Construct
  misc_feature 27: /note="Inverted DNA thymine"
ccagcauuuuuauuaauauggugacut

SEQ ID NO: 337 - RNA, 25 nt, Artificial Sequence
  Synthetic Construct
  misc_feature 24: /note="DNA thymine"
  misc_feature 25: /note="DNA thymine"
agucaccauauuaauaaaaaugctt

SEQ ID NO: 338 - RNA, 27 nt, Artificial Sequence
  Synthetic Construct
  misc_feature 27: /note="Inverted DNA thymine"
ccaauuuuuauuaauauggugacuuut

SEQ ID NO: 339 - RNA, 25 nt, Artificial Sequence
  Synthetic Construct
  misc_feature 24: /note="DNA thymine"
  misc_feature 25: /note="DNA thymine"
aaagucaccauauuaauaaaaautt

SEQ ID NO: 340 - RNA, 27 nt, Artificial Sequence
  Synthetic Construct
  misc_feature 27: /note="Inverted DNA thymine"
ccauuuuuauuaauauggugacuuuut

SEQ ID NO: 341 - RNA, 25 nt, Artificial Sequence
  Synthetic Construct
  misc_feature 24: /note="DNA thymine"
  misc_feature 25: /note="DNA thymine"
aaaagucaccauauuaauaaaaatt

SEQ ID NO: 342 - RNA, 27 nt, Artificial Sequence
  Synthetic Construct
  misc_feature 27: /note="Inverted DNA thymine"
ccauuuauuaauauggugacuuuuuat

SEQ ID NO: 343 - RNA, 25 nt, Artificial Sequence
  Synthetic Construct
  misc_feature 24: /note="DNA thymine"
  misc_feature 25: /note="DNA thymine"
uaaaaagucaccauauuaauaaatt

SEQ ID NO: 344 - RNA, 27 nt, Artificial Sequence
  Synthetic Construct
  misc_feature 27: /note="Inverted DNA thymine"
ccauuauuaauauggugacuuuuuaat

SEQ ID NO: 345 - RNA, 25 nt, Artificial Sequence
  Synthetic Construct
  misc_feature 24: /note="DNA thymine"
  misc_feature 25: /note="DNA thymine"
uuaaaaagucaccauauuaauaatt

SEQ ID NO: 346 - RNA, 23 nt, Artificial Sequence
  Synthetic Construct
  misc_feature 1: /note="2'-O-Methylcytidine"
  misc_feature 2: /note="2'-O-Methylcytidine"
  misc_feature 3: /note="2'-O-Methyladenosine"
  misc_feature 4: /note="2'- fluoro-uridine"
  misc_feature 5: /note="2'-O-Methyluridine"
  misc_feature 6: /note="2'-fluoroadenosine"
  misc_feature 7: /note="2'-O-Methyluridine"
  misc_feature 8: /note="2'- fluoro-uridine"
  misc_feature 9: /note="2'-O-Methyladenosine"
  misc_feature 10: /note="2'-fluoroadenosine"
  misc_feature 11: /note="2'-O-Methyluridine"
  misc_feature 12: /note="2'-fluoroadenosine"
  misc_feature 13: /note="2'-O-Methyluridine"
  misc_feature 14: /note="2'-Fluoro-guanosine"
  misc_feature 15: /note="2'-O-Methylguanosine"
  misc_feature 16: /note="2'- fluoro-uridine"
  misc_feature 17: /note="2'-O-Methylguanosine"
  misc_feature 18: /note="2'-fluoroadenosine"
  misc_feature 19: /note="2'-O-Methylcytidine"
  misc_feature 20: /note="2'- fluoro-uridine"
  misc_feature 21: /note="2'-O-Methyluridine"
  misc_feature 22: /note="2'- fluoro-uridine"
  misc_feature 23: /note="Inverted DNA thymine"
ccauuauuaauauggugacuuut

SEQ ID NO: 347 - RNA, 21 nt, Artificial Sequence
  Synthetic Construct
  misc_feature 1: /note="2'-fluoroadenosine"
  misc_feature 2: /note="2'-fluoroadenosine"
  misc_feature 3: /note="2'-O-Methyladenosine"
  misc_feature 4: /note="2'-Fluoro-guanosine"
  misc_feature 5: /note="2'-O-Methyluridine"
  misc_feature 6: /note="2'-Fluoro-cytidine"
  misc_feature 7: /note="2'-O-Methyladenosine"
  misc_feature 8: /note="2'-Fluoro-cytidine"
  misc_feature 9: /note="2'-O-Methylcytidine"
  misc_feature 10: /note="2'-fluoroadenosine"
  misc_feature 11: /note="2'-O-Methyluridine"
  misc_feature 12: /note="2'-fluoroadenosine"
  misc_feature 13: /note="2'-O-Methyluridine"
  misc_feature 14: /note="2'- fluoro-uridine"
  misc_feature 15: /note="2'-O-Methyladenosine"
  misc_feature 16: /note="2'-fluoroadenosine"
  misc_feature 17: /note="2'-O-Methyluridine"
  misc_feature 18: /note="2'-fluoroadenosine"
  misc_feature 19: /note="2'-O-Methyladenosine"
  misc_feature 20: /note="DNA thymine"
  misc_feature 21: /note="DNA thymine"
aaagucaccauauuaauaatt

SEQ ID NO: 348 - RNA, 23 nt, Artificial Sequence
  Synthetic Construct
  misc_feature 1: /note="2'-O-Methylcytidine"
  misc_feature 2: /note="2'-O-Methylcytidine"
  misc_feature 3: /note="2'-O-Methyladenosine"
  misc_feature 4: /note="2'-fluoroadenosine"
  misc_feature 5: /note="2'-O-Methyluridine"
  misc_feature 6: /note="2'-fluoroadenosine"
  misc_feature 7: /note="2'-O-Methyluridine"
  misc_feature 8: /note="2'-Fluoro-guanosine"
  misc_feature 9: /note="2'-O-Methylguanosine"
  misc_feature 10: /note="2'- fluoro-uridine"
  misc_feature 11: /note="2'-O-Methylguanosine"
  misc_feature 12: /note="2'-fluoroadenosine"
  misc_feature 13: /note="2'-O-Methylcytidine"
  misc_feature 14: /note="2'- fluoro-uridine"
  misc_feature 15: /note="2'-O-Methyluridine"
  misc_feature 16: /note="2'- fluoro-uridine"
  misc_feature 17: /note="2'-O-Methyluridine"
  misc_feature 18: /note="2'- fluoro-uridine"
  misc_feature 19: /note="2'-O-Methyladenosine"
  misc_feature 20: /note="2'-fluoroadenosine"
  misc_feature 21: /note="2'-O-Methyladenosine"
  misc_feature 22: /note="2'-fluoroadenosine"
  misc_feature 23: /note="Inverted DNA thymine"
ccaauauggugacuuuuuaaaat

SEQ ID NO: 349 - RNA, 21 nt, Artificial Sequence
  Synthetic Construct
  misc_feature 1: /note="2'- fluoro-uridine"
  misc_feature 2: /note="2'- fluoro-uridine"
  misc_feature 3: /note="2'-O-Methyluridine"
  misc_feature 4: /note="2'- fluoro-uridine"
  misc_feature 5: /note="2'-O-Methyladenosine"
  misc_feature 6: /note="2'-fluoroadenosine"
  misc_feature 7: /note="2'-O-Methyladenosine"
  misc_feature 8: /note="2'-fluoroadenosine"
  misc_feature 9: /note="2'-O-Methyladenosine"
  misc_feature 10: /note="2'-Fluoro-guanosine"
  misc_feature 11: /note="2'-O-Methyluridine"
  misc_feature 12: /note="2'-Fluoro-cytidine"
  misc_feature 13: /note="2'-O-Methyladenosine"
  misc_feature 14: /note="2'-Fluoro-cytidine"
  misc_feature 15: /note="2'-O-Methylcytidine"
  misc_feature 16: /note="2'-fluoroadenosine"
  misc_feature 17: /note="2'-O-Methyluridine"
  misc_feature 18: /note="2'-fluoroadenosine"
  misc_feature 19: /note="2'-O-Methyluridine"
  misc_feature 20: /note="DNA thymine"
  misc_feature 21: /note="DNA thymine"
uuuuaaaaagucaccauautt

SEQ ID NO: 350 - RNA, 25 nt, Artificial Sequence
  Synthetic Construct
  misc_feature 1: /note="2'-O-Methylcytidine"
  misc_feature 2: /note="2'-O-Methylcytidine"
  misc_feature 3: /note="2'-O-Methyladenosine"
  misc_feature 4: /note="2'-fluoroadenosine"
  misc_feature 5: /note="2'-O-Methyluridine"
  misc_feature 6: /note="2'- fluoro-uridine"
  misc_feature 7: /note="2'-O-Methyluridine"
  misc_feature 8: /note="2'- fluoro-uridine"
  misc_feature 9: /note="2'-O-Methyluridine"
  misc_feature 10: /note="2'-fluoroadenosine"
  misc_feature 11: /note="2'-O-Methyluridine"
  misc_feature 12: /note="2'- fluoro-uridine"
  misc_feature 13: /note="2'-O-Methyladenosine"
  misc_feature 14: /note="2'-fluoroadenosine"
  misc_feature 15: /note="2'-O-Methyluridine"
  misc_feature 16: /note="2'-fluoroadenosine"
  misc_feature 17: /note="2'-O-Methyluridine"
  misc_feature 18: /note="2'-Fluoro-guanosine"
  misc_feature 19: /note="2'-O-Methylguanosine"
  misc_feature 20: /note="2'- fluoro-uridine"
  misc_feature 21: /note="2'-O-Methylguanosine"
  misc_feature 22: /note="2'-fluoroadenosine"
  misc_feature 23: /note="2'-O-Methylcytidine"
  misc_feature 24: /note="2'- fluoro-uridine"
  misc_feature 25: /note="Inverted DNA thymine"
ccaauuuuuauuaauauggugacut

SEQ ID NO: 351 - RNA, 23 nt, Artificial Sequence
  Synthetic Construct
  misc_feature 1: /note="2'-fluoroadenosine"
  misc_feature 2: /note="2'-Fluoro-guanosine"
  misc_feature 3: /note="2'-O-Methyluridine"
  misc_feature 4: /note="2'-Fluoro-cytidine"
  misc_feature 5: /note="2'-O-Methyladenosine"
  misc_feature 6: /note="2'-Fluoro-cytidine"
  misc_feature 7: /note="2'-O-Methylcytidine"
  misc_feature 8: /note="2'-fluoroadenosine"
  misc_feature 9: /note="2'-O-Methyluridine"
  misc_feature 10: /note="2'-fluoroadenosine"
  misc_feature 11: /note="2'-O-Methyluridine"
  misc_feature 12: /note="2'- fluoro-uridine"
  misc_feature 13: /note="2'-O-Methyladenosine"
  misc_feature 14: /note="2'-fluoroadenosine"
  misc_feature 15: /note="2'-O-Methyluridine"
  misc_feature 16: /note="2'-fluoroadenosine"
  misc_feature 17: /note="2'-O-Methyladenosine"
  misc_feature 18: /note="2'-fluoroadenosine"
  misc_feature 19: /note="2'-O-Methyladenosine"
  misc_feature 20: /note="2'-fluoroadenosine"
  misc_feature 21: /note="2'-O-Methyluridine"
  misc_feature 22: /note="DNA thymine"
  misc_feature 23: /note="DNA thymine"
agucaccauauuaauaaaaautt

SEQ ID NO: 352 - RNA, 25 nt, Artificial Sequence
  Synthetic Construct
  misc_feature 1: /note="2'-O-Methylcytidine"
  misc_feature 2: /note="2'-O-Methylcytidine"
  misc_feature 3: /note="2'-O-Methyladenosine"
  misc_feature 4: /note="2'- fluoro-uridine"
  misc_feature 5: /note="2'-O-Methyluridine"
  misc_feature 6: /note="2'- fluoro-uridine"
  misc_feature 7: /note="2'-O-Methyluridine"
  misc_feature 8: /note="2'-fluoroadenosine"
  misc_feature 9: /note="2'-O-Methyluridine"
  misc_feature 10: /note="2'- fluoro-uridine"
  misc_feature 11: /note="2'-O-Methyladenosine"
  misc_feature 12: /note="2'-fluoroadenosine"
  misc_feature 13: /note="2'-O-Methyluridine"
  misc_feature 14: /note="2'-fluoroadenosine"
  misc_feature 15: /note="2'-O-Methyluridine"
  misc_feature 16: /note="2'-Fluoro-guanosine"
  misc_feature 17: /note="2'-O-Methylguanosine"
  misc_feature 18: /note="2'- fluoro-uridine"
  misc_feature 19: /note="2'-O-Methylguanosine"
  misc_feature 20: /note="2'-fluoroadenosine"
  misc_feature 21: /note="2'-O-Methylcytidine"
  misc_feature 22: /note="2'- fluoro-uridine"
  misc_feature 23: /note="2'-O-Methyluridine"
  misc_feature 24: /note="2'- fluoro-uridine"
  misc_feature 25: /note="Inverted DNA thymine"
ccauuuuauuaauauggugacuuut

SEQ ID NO: 353 - RNA, 23 nt, Artificial Sequence
  Synthetic Construct
  misc_feature 1: /note="2'-fluoroadenosine"
  misc_feature 2: /note="2'-fluoroadenosine"
  misc_feature 3: /note="2'-O-Methyladenosine"
  misc_feature 4: /note="2'-Fluoro-guanosine"
  misc_feature 5: /note="2'-O-Methyluridine"
  misc_feature 6: /note="2'-Fluoro-cytidine"
  misc_feature 7: /note="2'-O-Methyladenosine"
  misc_feature 8: /note="2'-Fluoro-cytidine"
  misc_feature 9: /note="2'-O-Methylcytidine"
  misc_feature 10: /note="2'-fluoroadenosine"
  misc_feature 11: /note="2'-O-Methyluridine"
  misc_feature 12: /note="2'-fluoroadenosine"
  misc_feature 13: /note="2'-O-Methyluridine"
  misc_feature 14: /note="2'- fluoro-uridine"
  misc_feature 15: /note="2'-O-Methyladenosine"
  misc_feature 16: /note="2'-fluoroadenosine"
  misc_feature 17: /note="2'-O-Methyluridine"
  misc_feature 18: /note="2'-fluoroadenosine"
  misc_feature 19: /note="2'-O-Methyladenosine"
  misc_feature 20: /note="2'-fluoroadenosine"
  misc_feature 21: /note="2'-O-Methyladenosine"
  misc_feature 22: /note="DNA thymine"
  misc_feature 23: /note="DNA thymine"
aaagucaccauauuaauaaaatt

SEQ ID NO: 354 - RNA, 25 nt, Artificial Sequence
  Synthetic Construct
  misc_feature 1: /note="2'-O-Methylcytidine"
  misc_feature 2: /note="2'-O-Methylcytidine"
  misc_feature 3: /note="2'-O-Methyladenosine"
  misc_feature 4: /note="2'- fluoro-uridine"
  misc_feature 5: /note="2'-O-Methyluridine"
  misc_feature 6: /note="2'- fluoro-uridine"
  misc_feature 7: /note="2'-O-Methyladenosine"
  misc_feature 8: /note="2'- fluoro-uridine"
  misc_feature 9: /note="2'-O-Methyluridine"
  misc_feature 10: /note="2'-fluoroadenosine"
  misc_feature 11: /note="2'-O-Methyladenosine"
  misc_feature 12: /note="2'- fluoro-uridine"
  misc_feature 13: /note="2'-O-Methyladenosine"
  misc_feature 14: /note="2'- fluoro-uridine"
  misc_feature 15: /note="2'-O-Methylguanosine"
  misc_feature 16: /note="2'-Fluoro-guanosine"
  misc_feature 17: /note="2'-O-Methyluridine"
  misc_feature 18: /note="2'-Fluoro-guanosine"
  misc_feature 19: /note="2'-O-Methyladenosine"
  misc_feature 20: /note="2'-Fluoro-cytidine"
  misc_feature 21: /note="2'-O-Methyluridine"
  misc_feature 22: /note="2'- fluoro-uridine"
  misc_feature 23: /note="2'-O-Methyluridine"
  misc_feature 24: /note="2'- fluoro-uridine"
  misc_feature 25: /note="Inverted DNA thymine"
ccauuuauuaauauggugacuuuut

SEQ ID NO: 355 - RNA, 23 nt, Artificial Sequence
  Synthetic Construct
  misc_feature 1: /note="2'-fluoroadenosine"
  misc_feature 2: /note="2'-fluoroadenosine"
  misc_feature 3: /note="2'-O-Methyladenosine"
  misc_feature 4: /note="2'-fluoroadenosine"
  misc_feature 5: /note="2'-O-Methylguanosine"
  misc_feature 6: /note="2'- fluoro-uridine"
  misc_feature 7: /note="2'-O-Methylcytidine"
  misc_feature 8: /note="2'-fluoroadenosine"
  misc_feature 9: /note="2'-O-Methylcytidine"
  misc_feature 10: /note="2'-Fluoro-cytidine"
  misc_feature 11: /note="2'-O-Methyladenosine"
  misc_feature 12: /note="2'- fluoro-uridine"
  misc_feature 13: /note="2'-O-Methyladenosine"
  misc_feature 14: /note="2'- fluoro-uridine"
  misc_feature 15: /note="2'-O-Methyluridine"
  misc_feature 16: /note="2'-fluoroadenosine"
  misc_feature 17: /note="2'-O-Methyladenosine"
  misc_feature 18: /note="2'- fluoro-uridine"
  misc_feature 19: /note="2'-O-Methyladenosine"
  misc_feature 20: /note="2'-fluoroadenosine"
  misc_feature 21: /note="2'-O-Methyladenosine"
  misc_feature 22: /note="DNA thymine"
  misc_feature 23: /note="DNA thymine"
aaaagucaccauauuaauaaatt

SEQ ID NO: 356 - RNA, 25 nt, Artificial Sequence
  Synthetic Construct
  misc_feature 1: /note="2'-O-Methylcytidine"
  misc_feature 2: /note="2'-O-Methylcytidine"
  misc_feature 3: /note="2'-O-Methyladenosine"
  misc_feature 4: /note="2'- fluoro-uridine"
  misc_feature 5: /note="2'-O-Methyladenosine"
  misc_feature 6: /note="2'- fluoro-uridine"
  misc_feature 7: /note="2'-O-Methyluridine"
  misc_feature 8: /note="2'-fluoroadenosine"
  misc_feature 9: /note="2'-O-Methyladenosine"
  misc_feature 10: /note="2'- fluoro-uridine"
  misc_feature 11: /note="2'-O-Methyladenosine"
  misc_feature 12: /note="2'- fluoro-uridine"
  misc_feature 13: /note="2'-O-Methylguanosine"
  misc_feature 14: /note="2'-Fluoro-guanosine"
  misc_feature 15: /note="2'-O-Methyluridine"
  misc_feature 16: /note="2'-Fluoro-guanosine"
  misc_feature 17: /note="2'-O-Methyladenosine"
  misc_feature 18: /note="2'-Fluoro-cytidine"
  misc_feature 19: /note="2'-O-Methyluridine"
  misc_feature 20: /note="2'- fluoro-uridine"
  misc_feature 21: /note="2'-O-Methyluridine"
  misc_feature 22: /note="2'- fluoro-uridine"
  misc_feature 23: /note="2'-O-Methyluridine"
  misc_feature 24: /note="2'-fluoroadenosine"
  misc_feature 25: /note="Inverted DNA thymine"
ccauauuaauauggugacuuuuuat

SEQ ID NO: 357 - RNA, 23 nt, Artificial Sequence
  Synthetic Construct
  misc_feature 1: /note="2'- fluoro-uridine"
  misc_feature 2: /note="2'-fluoroadenosine"
  misc_feature 3: /note="2'-O-Methyladenosine"
  misc_feature 4: /note="2'-fluoroadenosine"
  misc_feature 5: /note="2'-O-Methyladenosine"
  misc_feature 6: /note="2'-fluoroadenosine"
  misc_feature 7: /note="2'-O-Methylguanosine"
  misc_feature 8: /note="2'- fluoro-uridine"
  misc_feature 9: /note="2'-O-Methylcytidine"
  misc_feature 10: /note="2'-fluoroadenosine"
  misc_feature 11: /note="2'-O-Methylcytidine"
  misc_feature 12: /note="2'-Fluoro-cytidine"
  misc_feature 13: /note="2'-O-Methyladenosine"
  misc_feature 14: /note="2'- fluoro-uridine"
  misc_feature 15: /note="2'-O-Methyladenosine"
  misc_feature 16: /note="2'- fluoro-uridine"
  misc_feature 17: /note="2'-O-Methyluridine"
  misc_feature 18: /note="2'-fluoroadenosine"
  misc_feature 19: /note="2'-O-Methyladenosine"
  misc_feature 20: /note="2'- fluoro-uridine"
  misc_feature 21: /note="2'-O-Methyladenosine"
  misc_feature 22: /note="DNA thymine"
  misc_feature 23: /note="DNA thymine"
uaaaaagucaccauauuaauatt

SEQ ID NO: 358 - RNA, 25 nt, Artificial Sequence
  Synthetic Construct
  misc_feature 1: /note="2'-O-Methylcytidine"
  misc_feature 2: /note="2'-O-Methylcytidine"
  misc_feature 3: /note="2'-O-Methyladenosine"
  misc_feature 4: /note="2'-fluoroadenosine"
  misc_feature 5: /note="2'-O-Methyladenosine"
  misc_feature 6: /note="2'- fluoro-uridine"
  misc_feature 7: /note="2'-O-Methyladenosine"
  misc_feature 8: /note="2'- fluoro-uridine"
  misc_feature 9: /note="2'-O-Methylguanosine"
  misc_feature 10: /note="2'-Fluoro-guanosine"
  misc_feature 11: /note="2'-O-Methyluridine"
  misc_feature 12: /note="2'-Fluoro-guanosine"
  misc_feature 13: /note="2'-O-Methyladenosine"
  misc_feature 14: /note="2'-Fluoro-cytidine"
  misc_feature 15: /note="2'-O-Methyluridine"
  misc_feature 16: /note="2'- fluoro-uridine"
  misc_feature 17: /note="2'-O-Methyluridine"
  misc_feature 18: /note="2'- fluoro-uridine"
  misc_feature 19: /note="2'-O-Methyluridine"
  misc_feature 20: /note="2'-fluoroadenosine"
  misc_feature 21: /note="2'-O-Methyladenosine"
  misc_feature 22: /note="2'-fluoroadenosine"
  misc_feature 23: /note="2'-O-Methyladenosine"
  misc_feature 24: /note="2'- fluoro-uridine"
  misc_feature 25: /note="Inverted DNA thymine"
ccaaauauggugacuuuuuaaaaut

SEQ ID NO: 359 - RNA, 23 nt, Artificial Sequence
  Synthetic Construct
  misc_feature 1: /note="2'-fluoroadenosine"
  misc_feature 2: /note="2'- fluoro-uridine"
  misc_feature 3: /note="2'-O-Methyluridine"
  misc_feature 4: /note="2'- fluoro-uridine"
  misc_feature 5: /note="2'-O-Methyluridine"
  misc_feature 6: /note="2'-fluoroadenosine"
  misc_feature 7: /note="2'-O-Methyladenosine"
  misc_feature 8: /note="2'-fluoroadenosine"
  misc_feature 9: /note="2'-O-Methyladenosine"
  misc_feature 10: /note="2'-fluoroadenosine"
  misc_feature 11: /note="2'-O-Methylguanosine"
  misc_feature 12: /note="2'- fluoro-uridine"
  misc_feature 13: /note="2'-O-Methylcytidine"
  misc_feature 14: /note="2'-fluoroadenosine"
  misc_feature 15: /note="2'-O-Methylcytidine"
  misc_feature 16: /note="2'-Fluoro-cytidine"
  misc_feature 17: /note="2'-O-Methyladenosine"
  misc_feature 18: /note="2'- fluoro-uridine"
  misc_feature 19: /note="2'-O-Methyladenosine"
  misc_feature 20: /note="2'- fluoro-uridine"
  misc_feature 21: /note="2'-O-Methyluridine"
  misc_feature 22: /note="DNA thymine"
  misc_feature 23: /note="DNA thymine"
auuuuaaaaagucaccauauutt

SEQ ID NO: 360 - RNA, 27 nt, Artificial Sequence
  Synthetic Construct
  misc_feature 1: /note="2'-O-Methylcytidine"
  misc_feature 2: /note="2'-O-Methylcytidine"
  misc_feature 3: /note="2'-O-Methyladenosine"
  misc_feature 4: /note="2'-Fluoro-guanosine"
  misc_feature 5: /note="2'-O-Methylcytidine"
  misc_feature 6: /note="2'-fluoroadenosine"
  misc_feature 7: /note="2'-O-Methyluridine"
  misc_feature 8: /note="2'- fluoro-uridine"
  misc_feature 9: /note="2'-O-Methyluridine"
  misc_feature 10: /note="2'- fluoro-uridine"
  misc_feature 11: /note="2'-O-Methyluridine"
  misc_feature 12: /note="2'-fluoroadenosine"
  misc_feature 13: /note="2'-O-Methyluridine"
  misc_feature 14: /note="2'- fluoro-uridine"
  misc_feature 15: /note="2'-O-Methyladenosine"
  misc_feature 16: /note="2'-fluoroadenosine"
  misc_feature 17: /note="2'-O-Methyluridine"
  misc_feature 18: /note="2'-fluoroadenosine"
  misc_feature 19: /note="2'-O-Methyluridine"
  misc_feature 20: /note="2'-Fluoro-guanosine"
  misc_feature 21: /note="2'-O-Methylguanosine"
  misc_feature 22: /note="2'- fluoro-uridine"
  misc_feature 23: /note="2'-O-Methylguanosine"
  misc_feature 24: /note="2'-fluoroadenosine"
  misc_feature 25: /note="2'-O-Methylcytidine"
  misc_feature 26: /note="2'- fluoro-uridine"
  misc_feature 27: /note="Inverted DNA thymine"
ccagcauuuuuauuaauauggugacut

SEQ ID NO: 361 - RNA, 25 nt, Artificial Sequence
  Synthetic Construct
  misc_feature 1: /note="2'-fluoroadenosine"
  misc_feature 2: /note="2'-Fluoro-guanosine"
  misc_feature 3: /note="2'-O-Methyluridine"
  misc_feature 4: /note="2'-Fluoro-cytidine"
  misc_feature 5: /note="2'-O-Methyladenosine"
  misc_feature 6: /note="2'-Fluoro-cytidine"
  misc_feature 7: /note="2'-O-Methylcytidine"
  misc_feature 8: /note="2'-fluoroadenosine"
  misc_feature 9: /note="2'-O-Methyluridine"
  misc_feature 10: /note="2'-fluoroadenosine"
  misc_feature 11: /note="2'-O-Methyluridine"
  misc_feature 12: /note="2'- fluoro-uridine"
  misc_feature 13: /note="2'-O-Methyladenosine"
  misc_feature 14: /note="2'-fluoroadenosine"
  misc_feature 15: /note="2'-O-Methyluridine"
  misc_feature 16: /note="2'-fluoroadenosine"
  misc_feature 17: /note="2'-O-Methyladenosine"
  misc_feature 18: /note="2'-fluoroadenosine"
  misc_feature 19: /note="2'-O-Methyladenosine"
  misc_feature 20: /note="2'-fluoroadenosine"
  misc_feature 21: /note="2'-O-Methyluridine"
  misc_feature 22: /note="2'-Fluoro-guanosine"
  misc_feature 23: /note="2'-O-Methylcytidine"
  misc_feature 24: /note="DNA thymine"
  misc_feature 25: /note="DNA thymine"
agucaccauauuaauaaaaaugctt

SEQ ID NO: 362 - RNA, 27 nt, Artificial Sequence
  Synthetic Construct
  misc_feature 1: /note="2'-O-Methylcytidine"
  misc_feature 2: /note="2'-O-Methylcytidine"
  misc_feature 3: /note="2'-O-Methyladenosine"
  misc_feature 4: /note="2'-fluoroadenosine"
  misc_feature 5: /note="2'-O-Methyluridine"
  misc_feature 6: /note="2'- fluoro-uridine"
  misc_feature 7: /note="2'-O-Methyluridine"
  misc_feature 8: /note="2'- fluoro-uridine"
  misc_feature 9: /note="2'-O-Methyluridine"
  misc_feature 10: /note="2'-fluoroadenosine"
  misc_feature 11: /note="2'-O-Methyluridine"
  misc_feature 12: /note="2'- fluoro-uridine"
  misc_feature 13: /note="2'-O-Methyladenosine"
  misc_feature 14: /note="2'-fluoroadenosine"
  misc_feature 15: /note="2'-O-Methyluridine"
  misc_feature 16: /note="2'-fluoroadenosine"
  misc_feature 17: /note="2'-O-Methyluridine"
  misc_feature 18: /note="2'-Fluoro-guanosine"
  misc_feature 19: /note="2'-O-Methylguanosine"
  misc_feature 20: /note="2'- fluoro-uridine"
  misc_feature 21: /note="2'-O-Methylguanosine"
  misc_feature 22: /note="2'-fluoroadenosine"
  misc_feature 23: /note="2'-O-Methylcytidine"
  misc_feature 24: /note="2'- fluoro-uridine"
  misc_feature 25: /note="2'-O-Methyluridine"
  misc_feature 26: /note="2'- fluoro-uridine"
  misc_feature 27: /note="Inverted DNA thymine"
ccaauuuuuauuaauauggugacuuut

SEQ ID NO: 363 - RNA, 25 nt, Artificial Sequence
  Synthetic Construct
  misc_feature 1: /note="2'-fluoroadenosine"
  misc_feature 2: /note="2'-fluoroadenosine"
  misc_feature 3: /note="2'-O-Methyladenosine"
  misc_feature 4: /note="2'-Fluoro-guanosine"
  misc_feature 5: /note="2'-O-Methyluridine"
  misc_feature 6: /note="2'-Fluoro-cytidine"
  misc_feature 7: /note="2'-O-Methyladenosine"
  misc_feature 8: /note="2'-Fluoro-cytidine"
  misc_feature 9: /note="2'-O-Methylcytidine"
  misc_feature 10: /note="2'-fluoroadenosine"
  misc_feature 11: /note="2'-O-Methyluridine"
  misc_feature 12: /note="2'-fluoroadenosine"
  misc_feature 13: /note="2'-O-Methyluridine"
  misc_feature 14: /note="2'- fluoro-uridine"
  misc_feature 15: /note="2'-O-Methyladenosine"
  misc_feature 16: /note="2'-fluoroadenosine"
  misc_feature 17: /note="2'-O-Methyluridine"
  misc_feature 18: /note="2'-fluoroadenosine"
  misc_feature 19: /note="2'-O-Methyladenosine"
  misc_feature 20: /note="2'-fluoroadenosine"
  misc_feature 21: /note="2'-O-Methyladenosine"
  misc_feature 22: /note="2'-fluoroadenosine"
  misc_feature 23: /note="2'-O-Methyluridine"
  misc_feature 24: /note="DNA thymine"
  misc_feature 25: /note="DNA thymine"
aaagucaccauauuaauaaaaautt

SEQ ID NO: 364 - RNA, 27 nt, Artificial Sequence
  Synthetic Construct
  misc_feature 1: /note="2'-O-Methylcytidine"
  misc_feature 2: /note="2'-O-Methylcytidine"
  misc_feature 3: /note="2'-O-Methyladenosine"
  misc_feature 4: /note="2'- fluoro-uridine"
  misc_feature 5: /note="2'-O-Methyluridine"
  misc_feature 6: /note="2'- fluoro-uridine"
  misc_feature 7: /note="2'-O-Methyluridine"
  misc_feature 8: /note="2'- fluoro-uridine"
  misc_feature 9: /note="2'-O-Methyladenosine"
  misc_feature 10: /note="2'- fluoro-uridine"
  misc_feature 11: /note="2'-O-Methyluridine"
  misc_feature 12: /note="2'-fluoroadenosine"
  misc_feature 13: /note="2'-O-Methyladenosine"
  misc_feature 14: /note="2'- fluoro-uridine"
  misc_feature 15: /note="2'-O-Methyladenosine"
  misc_feature 16: /note="2'- fluoro-uridine"
  misc_feature 17: /note="2'-O-Methylguanosine"
  misc_feature 18: /note="2'-Fluoro-guanosine"
  misc_feature 19: /note="2'-O-Methyluridine"
  misc_feature 20: /note="2'-Fluoro-guanosine"
  misc_feature 21: /note="2'-O-Methyladenosine"
  misc_feature 22: /note="2'-Fluoro-cytidine"
  misc_feature 23: /note="2'-O-Methyluridine"
  misc_feature 24: /note="2'- fluoro-uridine"
  misc_feature 25: /note="2'-O-Methyluridine"
  misc_feature 26: /note="2'- fluoro-uridine"
  misc_feature 27: /note="Inverted DNA thymine"
ccauuuuuauuaauauggugacuuuut

SEQ ID NO: 365 - RNA, 25 nt, Artificial Sequence
  Synthetic Construct
  misc_feature 1: /note="2'-fluoroadenosine"
  misc_feature 2: /note="2'-fluoroadenosine"
  misc_feature 3: /note="2'-O-Methyladenosine"
  misc_feature 4: /note="2'-fluoroadenosine"
  misc_feature 5: /note="2'-O-Methylguanosine"
  misc_feature 6: /note="2'- fluoro-uridine"
  misc_feature 7: /note="2'-O-Methylcytidine"
  misc_feature 8: /note="2'-fluoroadenosine"
  misc_feature 9: /note="2'-O-Methylcytidine"
  misc_feature 10: /note="2'-Fluoro-cytidine"
  misc_feature 11: /note="2'-O-Methyladenosine"
  misc_feature 12: /note="2'- fluoro-uridine"
  misc_feature 13: /note="2'-O-Methyladenosine"
  misc_feature 14: /note="2'- fluoro-uridine"
  misc_feature 15: /note="2'-O-Methyluridine"
  misc_feature 16: /note="2'-fluoroadenosine"
  misc_feature 17: /note="2'-O-Methyladenosine"
  misc_feature 18: /note="2'- fluoro-uridine"
  misc_feature 19: /note="2'-O-Methyladenosine"
  misc_feature 20: /note="2'-fluoroadenosine"
  misc_feature 21: /note="2'-O-Methyladenosine"
  misc_feature 22: /note="2'-fluoroadenosine"
  misc_feature 23: /note="2'-O-Methyladenosine"
  misc_feature 24: /note="DNA thymine"
  misc_feature 25: /note="DNA thymine"
aaaagucaccauauuaauaaaaatt

SEQ ID NO: 366 - RNA, 27 nt, Artificial Sequence
  Synthetic Construct
  misc_feature 1: /note="2'-O-Methylcytidine"
  misc_feature 2: /note="2'-O-Methylcytidine"
  misc_feature 3: /note="2'-O-Methyladenosine"
  misc_feature 4: /note="2'- fluoro-uridine"
  misc_feature 5: /note="2'-O-Methyluridine"
  misc_feature 6: /note="2'- fluoro-uridine"
  misc_feature 7: /note="2'-O-Methyladenosine"
  misc_feature 8: /note="2'- fluoro-uridine"
  misc_feature 9: /note="2'-O-Methyluridine"
  misc_feature 10: /note="2'-fluoroadenosine"
  misc_feature 11: /note="2'-O-Methyladenosine"
  misc_feature 12: /note="2'- fluoro-uridine"
  misc_feature 13: /note="2'-O-Methyladenosine"
  misc_feature 14: /note="2'- fluoro-uridine"
  misc_feature 15: /note="2'-O-Methylguanosine"
  misc_feature 16: /note="2'-Fluoro-guanosine"
  misc_feature 17: /note="2'-O-Methyluridine"
  misc_feature 18: /note="2'-Fluoro-guanosine"
  misc_feature 19: /note="2'-O-Methyladenosine"
  misc_feature 20: /note="2'-Fluoro-cytidine"
  misc_feature 21: /note="2'-O-Methyluridine"
  misc_feature 22: /note="2'- fluoro-uridine"
  misc_feature 23: /note="2'-O-Methyluridine"
  misc_feature 24: /note="2'- fluoro-uridine"
  misc_feature 25: /note="2'-O-Methyluridine"
  misc_feature 26: /note="2'-fluoroadenosine"
  misc_feature 27: /note="Inverted DNA thymine"
ccauuuauuaauauggugacuuuuuat

SEQ ID NO: 367 - RNA, 25 nt, Artificial Sequence
  Synthetic Construct
  misc_feature 1: /note="2'- fluoro-uridine"
  misc_feature 2: /note="2'-fluoroadenosine"
  misc_feature 3: /note="2'-O-Methyladenosine"
  misc_feature 4: /note="2'-fluoroadenosine"
  misc_feature 5: /note="2'-O-Methyladenosine"
  misc_feature 6: /note="2'-fluoroadenosine"
  misc_feature 7: /note="2'-O-Methylguanosine"
  misc_feature 8: /note="2'- fluoro-uridine"
  misc_feature 9: /note="2'-O-Methylcytidine"
  misc_feature 10: /note="2'-fluoroadenosine"
  misc_feature 11: /note="2'-O-Methylcytidine"
  misc_feature 12: /note="2'-Fluoro-cytidine"
  misc_feature 13: /note="2'-O-Methyladenosine"
  misc_feature 14: /note="2'- fluoro-uridine"
  misc_feature 15: /note="2'-O-Methyladenosine"
  misc_feature 16: /note="2'- fluoro-uridine"
  misc_feature 17: /note="2'-O-Methyluridine"
  misc_feature 18: /note="2'-fluoroadenosine"
  misc_feature 19: /note="2'-O-Methyladenosine"
  misc_feature 20: /note="2'- fluoro-uridine"
  misc_feature 21: /note="2'-O-Methyladenosine"
  misc_feature 22: /note="2'-fluoroadenosine"
  misc_feature 23: /note="2'-O-Methyladenosine"
  misc_feature 24: /note="DNA thymine"
  misc_feature 25: /note="DNA thymine"
uaaaaagucaccauauuaauaaatt

SEQ ID NO: 368 - RNA, 27 nt, Artificial Sequence
  Synthetic Construct
  misc_feature 1: /note="2'-O-Methylcytidine"
  misc_feature 2: /note="2'-O-Methylcytidine"
  misc_feature 3: /note="2'-O-Methyladenosine"
  misc_feature 4: /note="2'- fluoro-uridine"
  misc_feature 5: /note="2'-O-Methyluridine"
  misc_feature 6: /note="2'-fluoroadenosine"
  misc_feature 7: /note="2'-O-Methyluridine"
  misc_feature 8: /note="2'- fluoro-uridine"
  misc_feature 9: /note="2'-O-Methyladenosine"
  misc_feature 10: /note="2'-fluoroadenosine"
  misc_feature 11: /note="2'-O-Methyluridine"
  misc_feature 12: /note="2'-fluoroadenosine"
  misc_feature 13: /note="2'-O-Methyluridine"
  misc_feature 14: /note="2'-Fluoro-guanosine"
  misc_feature 15: /note="2'-O-Methylguanosine"
  misc_feature 16: /note="2'- fluoro-uridine"
  misc_feature 17: /note="2'-O-Methylguanosine"
  misc_feature 18: /note="2'-fluoroadenosine"
  misc_feature 19: /note="2'-O-Methylcytidine"
  misc_feature 20: /note="2'- fluoro-uridine"
  misc_feature 21: /note="2'-O-Methyluridine"
  misc_feature 22: /note="2'- fluoro-uridine"
  misc_feature 23: /note="2'-O-Methyluridine"
  misc_feature 24: /note="2'- fluoro-uridine"
  misc_feature 25: /note="2'-O-Methyladenosine"
  misc_feature 26: /note="2'-fluoroadenosine"
  misc_feature 27: /note="Inverted DNA thymine"
ccauuauuaauauggugacuuuuuaat

SEQ ID NO: 369 - RNA, 25 nt, Artificial Sequence
  Synthetic Construct
  misc_feature 1: /note="2'- fluoro-uridine"
  misc_feature 2: /note="2'- fluoro-uridine"
  misc_feature 3: /note="2'-O-Methyladenosine"
  misc_feature 4: /note="2'-fluoroadenosine"
  misc_feature 5: /note="2'-O-Methyladenosine"
  misc_feature 6: /note="2'-fluoroadenosine"
  misc_feature 7: /note="2'-O-Methyladenosine"
  misc_feature 8: /note="2'-Fluoro-guanosine"
  misc_feature 9: /note="2'-O-Methyluridine"
  misc_feature 10: /note="2'-Fluoro-cytidine"
  misc_feature 11: /note="2'-O-Methyladenosine"
  misc_feature 12: /note="2'-Fluoro-cytidine"
  misc_feature 13: /note="2'-O-Methylcytidine"
  misc_feature 14: /note="2'-fluoroadenosine"
  misc_feature 15: /note="2'-O-Methyluridine"
  misc_feature 16: /note="2'-fluoroadenosine"
  misc_feature 17: /note="2'-O-Methyluridine"
  misc_feature 18: /note="2'- fluoro-uridine"
  misc_feature 19: /note="2'-O-Methyladenosine"
  misc_feature 20: /note="2'-fluoroadenosine"
  misc_feature 21: /note="2'-O-Methyluridine"
  misc_feature 22: /note="2'-fluoroadenosine"
  misc_feature 23: /note="2'-O-Methyladenosine"
  misc_feature 24: /note="DNA thymine"
  misc_feature 25: /note="DNA thymine"
uuaaaaagucaccauauuaauaatt

SEQ ID NO: 370 - RNA, 19 nt, Artificial Sequence
  Synthetic Construct
auuaauaaaaaugcuacaa

SEQ ID NO: 371 - RNA, 19 nt, Artificial Sequence
  Synthetic Construct
auauuaauaaaaaugcuac

SEQ ID NO: 372 - RNA, 19 nt, Artificial Sequence
  Synthetic Construct
accauauuaauaaaaaugc

SEQ ID NO: 373 - RNA, 19 nt, Artificial Sequence
  Synthetic Construct
agucaccauauuaauaaaa

SEQ ID NO: 374 - RNA, 19 nt, Artificial Sequence
  Synthetic Construct
aaaagucaccauauuaaua

SEQ ID NO: 375 - RNA, 19 nt, Artificial Sequence
  Synthetic Construct
aaaaagucaccauauuaau

SEQ ID NO: 376 - RNA, 19 nt, Artificial Sequence
  Synthetic Construct
uaaaaagucaccauauuaa

SEQ ID NO: 377 - RNA, 19 nt, Artificial Sequence
  Synthetic Construct
uuaaaaagucaccauauua

SEQ ID NO: 378 - RNA, 19 nt, Artificial Sequence
  Synthetic Construct
auuuuaaaaagucaccaua

SEQ ID NO: 379 - RNA, 19 nt, Artificial Sequence
  Synthetic Construct
aucagcaccuuucacacuc

SEQ ID NO: 380 - RNA, 19 nt, Artificial Sequence
  Synthetic Construct
aaagucaccauauuaauaa

SEQ ID NO: 381 - RNA, 19 nt, Artificial Sequence
  Synthetic Construct
uuuuaaaaagucaccauau

SEQ ID NO: 382 - RNA, 21 nt, Artificial Sequence
  Synthetic Construct
agucaccauauuaauaaaaau

SEQ ID NO: 383 - RNA, 21 nt, Artificial Sequence
  Synthetic Construct
aaagucaccauauuaauaaaa

SEQ ID NO: 384 - RNA, 21 nt, Artificial Sequence
  Synthetic Construct
aaaagucaccauauuaauaaa

SEQ ID NO: 385 - RNA, 21 nt, Artificial Sequence
  Synthetic Construct
uaaaaagucaccauauuaaua

SEQ ID NO: 386 - RNA, 21 nt, Artificial Sequence
  Synthetic Construct
auuuuaaaaagucaccauauu

SEQ ID NO: 387 - RNA, 23 nt, Artificial Sequence
  Synthetic Construct
agucaccauauuaauaaaaaugc

SEQ ID NO: 388 - RNA, 23 nt, Artificial Sequence
  Synthetic Construct
aaagucaccauauuaauaaaaau

SEQ ID NO: 389 - RNA, 23 nt, Artificial Sequence
  Synthetic Construct
aaaagucaccauauuaauaaaaa

SEQ ID NO: 390 - RNA, 23 nt, Artificial Sequence
  Synthetic Construct
uaaaaagucaccauauuaauaaa

SEQ ID NO: 391 - RNA, 23 nt, Artificial Sequence
  Synthetic Construct
uuaaaaagucaccauauuaauaa

SEQ ID NO: 392 - RNA, 23 nt, Artificial Sequence
  Synthetic Construct
  misc_feature 23: /note="Inverted DNA thymine"
ccacaggacagcaaccucuccct

SEQ ID NO: 393 - RNA, 21 nt, Artificial Sequence
  Synthetic Construct
  misc_feature 20: /note="DNA thymine"
  misc_feature 21: /note="DNA thymine"
gggagagguugcuguccugtt

SEQ ID NO: 394 - RNA, 23 nt, Artificial Sequence
  Synthetic Construct
  misc_feature 23: /note="Inverted DNA thymine"
ccaaggacagcaaccucucccct

SEQ ID NO: 395 - RNA, 21 nt, Artificial Sequence
  Synthetic Construct
  misc_feature 20: /note="DNA thymine"
  misc_feature 21: /note="DNA thymine"
ggggagagguugcuguccutt

SEQ ID NO: 396 - RNA, 23 nt, Artificial Sequence
  Synthetic Construct
  misc_feature 23: /note="Inverted DNA thymine"
ccaugccacugcugcugcugcut

SEQ ID NO: 397 - RNA, 21 nt, Artificial Sequence
  Synthetic Construct
  misc_feature 20: /note="DNA thymine"
  misc_feature 21: /note="DNA thymine"
agcagcagcagcaguggcatt

SEQ ID NO: 398 - RNA, 23 nt, Artificial Sequence
  Synthetic Construct
  misc_feature 23: /note="Inverted DNA thymine"
ccacacugcugcugcugcugcut

SEQ ID NO: 399 - RNA, 21 nt, Artificial Sequence
  Synthetic Construct
  misc_feature 20: /note="DNA thymine"
  misc_feature 21: /note="DNA thymine"
agcagcagcagcagcagugtt

SEQ ID NO: 400 - RNA, 23 nt, Artificial Sequence
  Synthetic Construct
  misc_feature 23: /note="Inverted DNA thymine"
ccaugcugcugcugcugcuccut

SEQ ID NO: 401 - RNA, 21 nt, Artificial Sequence
  Synthetic Construct
  misc_feature 20: /note="DNA thymine"
  misc_feature 21: /note="DNA thymine"
aggagcagcagcagcagcatt

SEQ ID NO: 402 - RNA, 23 nt, Artificial Sequence
  Synthetic Construct
  misc_feature 23: /note="Inverted DNA thymine"
ccaacccugacuggcugcagugt

SEQ ID NO: 403 - RNA, 21 nt, Artificial Sequence
  Synthetic Construct
  misc_feature 20: /note="DNA thymine"
  misc_feature 21: /note="DNA thymine"
cacugcagccagucagggutt

SEQ ID NO: 404 - RNA, 23 nt, Artificial Sequence
  Synthetic Construct
  misc_feature 23: /note="Inverted DNA thymine"
ccaugaaaggugcugauggccct

SEQ ID NO: 405 - RNA, 21 nt, Artificial Sequence
  Synthetic Construct
  misc_feature 20: /note="DNA thymine"
  misc_feature 21: /note="DNA thymine"
gggccaucagcaccuuucatt

SEQ ID NO: 406 - RNA, 23 nt, Artificial Sequence
  Synthetic Construct
  misc_feature 23: /note="Inverted DNA thymine"
ccaggcugugccuugguuuccut

SEQ ID NO: 407 - RNA, 21 nt, Artificial Sequence
  Synthetic Construct
  misc_feature 20: /note="DNA thymine"
  misc_feature 21: /note="DNA thymine"
aggaaaccaaggcacagcctt

SEQ ID NO: 408 - RNA, 23 nt, Artificial Sequence
  Synthetic Construct
  misc_feature 23: /note="Inverted DNA thymine"
ccacugugccuugguuuccugat

SEQ ID NO: 409 - RNA, 21 nt, Artificial Sequence
  Synthetic Construct
  misc_feature 20: /note="DNA thymine"
  misc_feature 21: /note="DNA thymine"
ucaggaaaccaaggcacagtt

SEQ ID NO: 410 - RNA, 23 nt, Artificial Sequence
  Synthetic Construct
  misc_feature 23: /note="Inverted DNA thymine"
ccaggaagaaaccuggaaccagt

SEQ ID NO: 411 - RNA, 21 nt, Artificial Sequence
  Synthetic Construct
  misc_feature 20: /note="DNA thymine"
  misc_feature 21: /note="DNA thymine"
cugguuccagguuucuucctt

SEQ ID NO: 412 - RNA, 23 nt, Artificial Sequence
  Synthetic Construct
  misc_feature 23: /note="Inverted DNA thymine"
ccaaagaaaccuggaaccagagt

SEQ ID NO: 413 - RNA, 21 nt, Artificial Sequence
  Synthetic Construct
  misc_feature 20: /note="DNA thymine"
  misc_feature 21: /note="DNA thymine"
cucugguuccagguuucuutt

SEQ ID NO: 414 - RNA, 23 nt, Artificial Sequence
  Synthetic Construct
  misc_feature 23: /note="Inverted DNA thymine"
ccaagaaaccuggaaccagaggt

SEQ ID NO: 415 - RNA, 21 nt, Artificial Sequence
  Synthetic Construct
  misc_feature 20: /note="DNA thymine"
  misc_feature 21: /note="DNA thymine"
ccucugguuccagguuucutt

SEQ ID NO: 416 - RNA, 23 nt, Artificial Sequence
  Synthetic Construct
  misc_feature 23: /note="Inverted DNA thymine"
ccaaaccuggaaccagagggggt

SEQ ID NO: 417 - RNA, 21 nt, Artificial Sequence
  Synthetic Construct
  misc_feature 20: /note="DNA thymine"
  misc_feature 21: /note="DNA thymine"
cccccucugguuccagguutt

SEQ ID NO: 418 - RNA, 23 nt, Artificial Sequence
  Synthetic Construct
  misc_feature 23: /note="Inverted DNA thymine"
ccacauuuuuauuaauauggugt

SEQ ID NO: 419 - RNA, 21 nt, Artificial Sequence
  Synthetic Construct
  misc_feature 20: /note="DNA thymine"
  misc_feature 21: /note="DNA thymine"
caccauauuaauaaaaaugtt

SEQ ID NO: 420 - RNA, 23 nt, Artificial Sequence
  Synthetic Construct
  misc_feature 23: /note="Inverted DNA thymine"
ccaauuuuuauuaauauggugat

SEQ ID NO: 421 - RNA, 21 nt, Artificial Sequence
  Synthetic Construct
  misc_feature 20: /note="DNA thymine"
  misc_feature 21: /note="DNA thymine"
ucaccauauuaauaaaaautt

SEQ ID NO: 422 - RNA, 23 nt, Artificial Sequence
  Synthetic Construct
  misc_feature 23: /note="Inverted DNA thymine"
ccaaauauggugacuuuuuaaat

SEQ ID NO: 423 - RNA, 21 nt, Artificial Sequence
  Synthetic Construct
  misc_feature 20: /note="DNA thymine"
  misc_feature 21: /note="DNA thymine"
uuuaaaaagucaccauauutt

SEQ ID NO: 424 - RNA, 23 nt, Artificial Sequence
  Synthetic Construct
  misc_feature 23: /note="Inverted DNA thymine"
ccaauauggugacuuuuuaaaat

SEQ ID NO: 425 - RNA, 21 nt, Artificial Sequence
  Synthetic Construct
  misc_feature 20: /note="DNA thymine"
  misc_feature 21: /note="DNA thymine"
uuuuaaaaagucaccauautt

SEQ ID NO: 426 - RNA, 23 nt, Artificial Sequence
  Synthetic Construct
  misc_feature 23: /note="Inverted DNA thymine"
ccaauggugacuuuuuaaaauat

SEQ ID NO: 427 - RNA, 21 nt, Artificial Sequence
  Synthetic Construct
  misc_feature 20: /note="DNA thymine"
  misc_feature 21: /note="DNA thymine"
uauuuuaaaaagucaccautt

SEQ ID NO: 428 - RNA, 23 nt, Artificial Sequence
  Synthetic Construct
  misc_feature 23: /note="Inverted DNA thymine"
ccauggugacuuuuuaaaauaat

SEQ ID NO: 429 - RNA, 21 nt, Artificial Sequence
  Synthetic Construct
  misc_feature 20: /note="DNA thymine"
  misc_feature 21: /note="DNA thymine"
uuauuuuaaaaagucaccatt

SEQ ID NO: 430 - RNA, 23 nt, Artificial Sequence
  Synthetic Construct
  misc_feature 23: /note="Inverted DNA thymine"
ccaggugacuuuuuaaaauaaat

SEQ ID NO: 431 - RNA, 21 nt, Artificial Sequence
  Synthetic Construct
  misc_feature 20: /note="DNA thymine"
  misc_feature 21: /note="DNA thymine"
uuuauuuuaaaaagucacctt

SEQ ID NO: 432 - RNA, 23 nt, Artificial Sequence
  Synthetic Construct
  misc_feature 23: /note="Inverted DNA thymine"
ccagugacuuuuuaaaauaaaat

SEQ ID NO: 433 - RNA, 21 nt, Artificial Sequence
  Synthetic Construct
  misc_feature 20: /note="DNA thymine"
  misc_feature 21: /note="DNA thymine"
uuuuauuuuaaaaagucactt

SEQ ID NO: 434 - RNA, 23 nt, Artificial Sequence
  Synthetic Construct
  misc_feature 23: /note="Inverted DNA thymine"
ccaugacuuuuuaaaauaaaaat

SEQ ID NO: 435 - RNA, 21 nt, Artificial Sequence
  Synthetic Construct
  misc_feature 20: /note="DNA thymine"
  misc_feature 21: /note="DNA thymine"
uuuuuauuuuaaaaagucatt

SEQ ID NO: 436 - RNA, 23 nt, Artificial Sequence
  Synthetic Construct
  misc_feature 23: /note="Inverted DNA thymine"
ccagacuuuuuaaaauaaaaact

SEQ ID NO: 437 - RNA, 21 nt, Artificial Sequence
  Synthetic Construct
  misc_feature 20: /note="DNA thymine"
  misc_feature 21: /note="DNA thymine"
guuuuuauuuuaaaaaguctt

SEQ ID NO: 438 - RNA, 23 nt, Artificial Sequence
  Synthetic Construct
  misc_feature 23: /note="Inverted DNA thymine"
ccaacuuuuuaaaauaaaaacat

SEQ ID NO: 439 - RNA, 21 nt, Artificial Sequence
  Synthetic Construct
  misc_feature 20: /note="DNA thymine"
  misc_feature 21: /note="DNA thymine"
uguuuuuauuuuaaaaagutt

SEQ ID NO: 440 - RNA, 23 nt, Artificial Sequence
  Synthetic Construct
  misc_feature 23: /note="Inverted DNA thymine"
ccacuuuuuaaaauaaaaacaat

SEQ ID NO: 441 - RNA, 21 nt, Artificial Sequence
  Synthetic Construct
  misc_feature 20: /note="DNA thymine"
  misc_feature 21: /note="DNA thymine"
uuguuuuuauuuuaaaaagtt

SEQ ID NO: 442 - RNA, 23 nt, Artificial Sequence
  Synthetic Construct
  misc_feature 23: /note="Inverted DNA thymine"
ccauuuuuaaaauaaaaacaaat

SEQ ID NO: 443 - RNA, 21 nt, Artificial Sequence
  Synthetic Construct
  misc_feature 20: /note="DNA thymine"
  misc_feature 21: /note="DNA thymine"
uuuguuuuuauuuuaaaaatt

SEQ ID NO: 444 - RNA, 23 nt, Artificial Sequence
  Synthetic Construct
  misc_feature 23: /note="Inverted DNA thymine"
ccauuuuaaaauaaaaacaaact

SEQ ID NO: 445 - RNA, 21 nt, Artificial Sequence
  Synthetic Construct
  misc_feature 20: /note="DNA thymine"
  misc_feature 21: /note="DNA thymine"
guuuguuuuuauuuuaaaatt

SEQ ID NO: 446 - RNA, 23 nt, Artificial Sequence
  Synthetic Construct
  misc_feature 23: /note="Inverted DNA thymine"
ccauuuaaaauaaaaacaaacat

SEQ ID NO: 447 - RNA, 21 nt, Artificial Sequence
  Synthetic Construct
  misc_feature 20: /note="DNA thymine"
  misc_feature 21: /note="DNA thymine"
uguuuguuuuuauuuuaaatt

SEQ ID NO: 448 - RNA, 23 nt, Artificial Sequence
  Synthetic Construct
  misc_feature 23: /note="Inverted DNA thymine"
ccacauuuuuauuaauauggugt

SEQ ID NO: 449 - RNA, 21 nt, Artificial Sequence
  Synthetic Construct
  misc_feature 20: /note="DNA thymine"
  misc_feature 21: /note="DNA thymine"
caccauauuaauaaaaaugtt

SEQ ID NO: 450 - RNA, 23 nt, Artificial Sequence
  Synthetic Construct
  misc_feature 23: /note="Inverted DNA thymine"
ccaauuuuuauuaauauggugat

SEQ ID NO: 451 - RNA, 21 nt, Artificial Sequence
  Synthetic Construct
  misc_feature 20: /note="DNA thymine"
  misc_feature 21: /note="DNA thymine"
ucaccauauuaauaaaaautt

SEQ ID NO: 452 - RNA, 23 nt, Artificial Sequence
  Synthetic Construct
  misc_feature 23: /note="Inverted DNA thymine"
ccauuuuuauuaauauggugact

SEQ ID NO: 453 - RNA, 21 nt, Artificial Sequence
  Synthetic Construct
  misc_feature 20: /note="DNA thymine"
  misc_feature 21: /note="DNA thymine"
gucaccauauuaauaaaaatt

SEQ ID NO: 454 - RNA, 23 nt, Artificial Sequence
  Synthetic Construct
  misc_feature 23: /note="Inverted DNA thymine"
ccauuuauuaauauggugacuut

SEQ ID NO: 455 - RNA, 21 nt, Artificial Sequence
  Synthetic Construct
  misc_feature 20: /note="DNA thymine"
  misc_feature 21: /note="DNA thymine"
aagucaccauauuaauaaatt

SEQ ID NO: 456 - RNA, 23 nt, Artificial Sequence
  Synthetic Construct
  misc_feature 23: /note="Inverted DNA thymine"
ccauuauuaauauggugacuuut

SEQ ID NO: 457 - RNA, 21 nt, Artificial Sequence
  Synthetic Construct
  misc_feature 20: /note="DNA thymine"
  misc_feature 21: /note="DNA thymine"
aaagucaccauauuaauaatt

SEQ ID NO: 458 - RNA, 23 nt, Artificial Sequence
  Synthetic Construct
  misc_feature 23: /note="Inverted DNA thymine"
ccaaauauggugacuuuuuaaat

SEQ ID NO: 459 - RNA, 21 nt, Artificial Sequence
  Synthetic Construct
  misc_feature 20: /note="DNA thymine"
  misc_feature 21: /note="DNA thymine"
uuuaaaaagucaccauauutt

SEQ ID NO: 460 - RNA, 25 nt, Artificial Sequence
  Synthetic Construct
  misc_feature 25: /note="Inverted DNA thymine"
ccagcauuuuuauuaauauggugat

SEQ ID NO: 461 - RNA, 23 nt, Artificial Sequence
  Synthetic Construct
  misc_feature 22: /note="DNA thymine"
  misc_feature 23: /note="DNA thymine"
ucaccauauuaauaaaaaugctt

SEQ ID NO: 462 - RNA, 25 nt, Artificial Sequence
  Synthetic Construct
  misc_feature 25: /note="Inverted DNA thymine"
ccacauuuuuauuaauauggugact

SEQ ID NO: 463 - RNA, 23 nt, Artificial Sequence
  Synthetic Construct
  misc_feature 22: /note="DNA thymine"
  misc_feature 23: /note="DNA thymine"
gucaccauauuaauaaaaaugtt

SEQ ID NO: 464 - RNA, 25 nt, Artificial Sequence
  Synthetic Construct
  misc_feature 25: /note="Inverted DNA thymine"
ccauuuuuauuaauauggugacuut

SEQ ID NO: 465 - RNA, 23 nt, Artificial Sequence
  Synthetic Construct
  misc_feature 22: /note="DNA thymine"
  misc_feature 23: /note="DNA thymine"
aagucaccauauuaauaaaaatt

SEQ ID NO: 466 - RNA, 25 nt, Artificial Sequence
  Synthetic Construct
  misc_feature 25: /note="Inverted DNA thymine"
ccauuauuaauauggugacuuuuut

SEQ ID NO: 467 - RNA, 23 nt, Artificial Sequence
  Synthetic Construct
  misc_feature 22: /note="DNA thymine"
  misc_feature 23: /note="DNA thymine"
aaaaagucaccauauuaauaatt

SEQ ID NO: 468 - RNA, 25 nt, Artificial Sequence
  Synthetic Construct
  misc_feature 25: /note="Inverted DNA thymine"
ccaauuaauauggugacuuuuuaat

SEQ ID NO: 469 - RNA, 23 nt, Artificial Sequence
  Synthetic Construct
  misc_feature 22: /note="DNA thymine"
  misc_feature 23: /note="DNA thymine"
uuaaaaagucaccauauuaautt

SEQ ID NO: 470 - RNA, 25 nt, Artificial Sequence
  Synthetic Construct
  misc_feature 25: /note="Inverted DNA thymine"
ccauuaauauggugacuuuuuaaat

SEQ ID NO: 471 - RNA, 23 nt, Artificial Sequence
  Synthetic Construct
  misc_feature 22: /note="DNA thymine"
  misc_feature 23: /note="DNA thymine"
uuuaaaaagucaccauauuaatt

SEQ ID NO: 472 - RNA, 25 nt, Artificial Sequence
  Synthetic Construct
  misc_feature 25: /note="Inverted DNA thymine"
ccauaauauggugacuuuuuaaaat

SEQ ID NO: 473 - RNA, 23 nt, Artificial Sequence
  Synthetic Construct
  misc_feature 22: /note="DNA thymine"
  misc_feature 23: /note="DNA thymine"
uuuuaaaaagucaccauauuatt

SEQ ID NO: 474 - RNA, 27 nt, Artificial Sequence
  Synthetic Construct
  misc_feature 27: /note="Inverted DNA thymine"
ccacauuuuuauuaauauggugacuut

SEQ ID NO: 475 - RNA, 25 nt, Artificial Sequence
  Synthetic Construct
  misc_feature 24: /note="DNA thymine"
  misc_feature 25: /note="DNA thymine"
aagucaccauauuaauaaaaaugtt

SEQ ID NO: 476 - RNA, 27 nt, Artificial Sequence
  Synthetic Construct
  misc_feature 27: /note="Inverted DNA thymine"
ccauuuuauuaauauggugacuuuuut

SEQ ID NO: 477 - RNA, 25 nt, Artificial Sequence
  Synthetic Construct
  misc_feature 24: /note="DNA thymine"
  misc_feature 25: /note="DNA thymine"
aaaaagucaccauauuaauaaaatt

SEQ ID NO: 478 - RNA, 27 nt, Artificial Sequence
  Synthetic Construct
  misc_feature 27: /note="Inverted DNA thymine"
ccauauuaauauggugacuuuuuaaat

SEQ ID NO: 479 - RNA, 25 nt, Artificial Sequence
  Synthetic Construct
  misc_feature 24: /note="DNA thymine"
  misc_feature 25: /note="DNA thymine"
uuuaaaaagucaccauauuaauatt

SEQ ID NO: 480 - RNA, 27 nt, Artificial Sequence
  Synthetic Construct
  misc_feature 27: /note="Inverted DNA thymine"
ccaauuaauauggugacuuuuuaaaat

SEQ ID NO: 481 - RNA, 25 nt, Artificial Sequence
  Synthetic Construct
  misc_feature 24: /note="DNA thymine"
  misc_feature 25: /note="DNA thymine"
uuuuaaaaagucaccauauuaautt

SEQ ID NO: 482 - RNA, 27 nt, Artificial Sequence
  Synthetic Construct
  misc_feature 27: /note="Inverted DNA thymine"
ccauuaauauggugacuuuuuaaaaut

SEQ ID NO: 483 - RNA, 25 nt, Artificial Sequence
  Synthetic Construct
  misc_feature 24: /note="DNA thymine"
  misc_feature 25: /note="DNA thymine"
auuuuaaaaagucaccauauuaatt

SEQ ID NO: 484 - RNA, 23 nt, Artificial Sequence
  Synthetic Construct
  misc_feature 1: /note="2'-O-Methylcytidine"
  misc_feature 2: /note="2'-O-Methylcytidine"
  misc_feature 3: /note="2'-O-Methyladenosine"
  misc_feature 4: /note="2'-Fluoro-cytidine"
  misc_feature 5: /note="2'-O-Methyladenosine"
  misc_feature 6: /note="2'-Fluoro-guanosine"
  misc_feature 7: /note="2'-O-Methylguanosine"
  misc_feature 8: /note="2'-fluoroadenosine"
  misc_feature 9: /note="2'-O-Methylcytidine"
  misc_feature 10: /note="2'-fluoroadenosine"
  misc_feature 11: /note="2'-O-Methylguanosine"
  misc_feature 12: /note="2'-Fluoro-cytidine"
  misc_feature 13: /note="2'-O-Methyladenosine"
  misc_feature 14: /note="2'-fluoroadenosine"
  misc_feature 15: /note="2'-O-Methylcytidine"
  misc_feature 16: /note="2'-Fluoro-cytidine"
  misc_feature 17: /note="2'-O-Methyluridine"
  misc_feature 18: /note="2'-Fluoro-cytidine"
  misc_feature 19: /note="2'-O-Methyluridine"
  misc_feature 20: /note="2'-Fluoro-cytidine"
  misc_feature 21: /note="2'-O-Methylcytidine"
  misc_feature 22: /note="2'-Fluoro-cytidine"
  misc_feature 23: /note="Inverted DNA thymine"
ccacaggacagcaaccucuccct

SEQ ID NO: 485 - RNA, 21 nt, Artificial Sequence
  Synthetic Construct
  misc_feature 1: /note="2'-Fluoro-guanosine"
  misc_feature 2: /note="2'-Fluoro-guanosine"
  misc_feature 3: /note="2'-O-Methylguanosine"
  misc_feature 4: /note="2'-fluoroadenosine"
  misc_feature 5: /note="2'-O-Methylguanosine"
  misc_feature 6: /note="2'-fluoroadenosine"
  misc_feature 7: /note="2'-O-Methylguanosine"
  misc_feature 8: /note="2'-Fluoro-guanosine"
  misc_feature 9: /note="2'-O-Methyluridine"
  misc_feature 10: /note="2'- fluoro-uridine"
  misc_feature 11: /note="2'-O-Methylguanosine"
  misc_feature 12: /note="2'-Fluoro-cytidine"
  misc_feature 13: /note="2'-O-Methyluridine"
  misc_feature 15: /note="2'-O-Methyluridine"
  misc_feature 16: /note="2'-Fluoro-cytidine"
  misc_feature 17: /note="2'-O-Methylcytidine"
  misc_feature 18: /note="2'- fluoro-uridine"
  misc_feature 19: /note="2'-O-Methylguanosine"
  misc_feature 20: /note="DNA thymine"
  misc_feature 21: /note="DNA thymine"
gggagagguugcuguccugtt

SEQ ID NO: 486 - RNA, 23 nt, Artificial Sequence
  Synthetic Construct
  misc_feature 1: /note="2'-O-Methylcytidine"
  misc_feature 2: /note="2'-O-Methylcytidine"
  misc_feature 3: /note="2'-O-Methyladenosine"
  misc_feature 4: /note="2'-fluoroadenosine"
  misc_feature 5: /note="2'-O-Methylguanosine"
  misc_feature 6: /note="2'-Fluoro-guanosine"
  misc_feature 7: /note="2'-O-Methyladenosine"
  misc_feature 8: /note="2'-Fluoro-cytidine"
  misc_feature 9: /note="2'-O-Methyladenosine"
  misc_feature 10: /note="2'-Fluoro-guanosine"
  misc_feature 11: /note="2'-O-Methylcytidine"
  misc_feature 12: /note="2'-fluoroadenosine"
  misc_feature 13: /note="2'-O-Methyladenosine"
  misc_feature 14: /note="2'-Fluoro-cytidine"
  misc_feature 15: /note="2'-O-Methylcytidine"
  misc_feature 16: /note="2'- fluoro-uridine"
  misc_feature 17: /note="2'-O-Methylcytidine"
  misc_feature 18: /note="2'- fluoro-uridine"
  misc_feature 19: /note="2'-O-Methylcytidine"
  misc_feature 20: /note="2'-Fluoro-cytidine"
  misc_feature 21: /note="2'-O-Methylcytidine"
  misc_feature 22: /note="2'-Fluoro-cytidine"
  misc_feature 23: /note="Inverted DNA thymine"
ccaaggacagcaaccucucccct

SEQ ID NO: 487 - RNA, 21 nt, Artificial Sequence
  Synthetic Construct
  misc_feature 1: /note="2'-Fluoro-guanosine"
  misc_feature 2: /note="2'-Fluoro-guanosine"
  misc_feature 3: /note="2'-O-Methylguanosine"
  misc_feature 4: /note="2'-Fluoro-guanosine"
  misc_feature 5: /note="2'-O-Methyladenosine"
  misc_feature 6: /note="2'-Fluoro-guanosine"
  misc_feature 7: /note="2'-O-Methyladenosine"
  misc_feature 8: /note="2'-Fluoro-guanosine"
  misc_feature 9: /note="2'-O-Methylguanosine"
  misc_feature 10: /note="2'- fluoro-uridine"
  misc_feature 11: /note="2'-O-Methyluridine"
  misc_feature 12: /note="2'-Fluoro-guanosine"
  misc_feature 13: /note="2'-O-Methylcytidine"
  misc_feature 14: /note="2'- fluoro-uridine"
  misc_feature 15: /note="2'-O-Methylguanosine"
  misc_feature 16: /note="2'- fluoro-uridine"
  misc_feature 17: /note="2'-O-Methylcytidine"
  misc_feature 18: /note="2'-Fluoro-cytidine"
  misc_feature 19: /note="2'-O-Methyluridine"
  misc_feature 20: /note="DNA thymine"
  misc_feature 21: /note="DNA thymine"
ggggagagguugcuguccutt

SEQ ID NO: 488 - RNA, 23 nt, Artificial Sequence
  Synthetic Construct
  misc_feature 1: /note="2'-O-Methylcytidine"
  misc_feature 2: /note="2'-O-Methylcytidine"
  misc_feature 3: /note="2'-O-Methyladenosine"
  misc_feature 4: /note="2'- fluoro-uridine"
  misc_feature 5: /note="2'-O-Methylguanosine"
  misc_feature 6: /note="2'-Fluoro-cytidine"
  misc_feature 7: /note="2'-O-Methylcytidine"
  misc_feature 8: /note="2'-fluoroadenosine"
  misc_feature 9: /note="2'-O-Methylcytidine"
  misc_feature 10: /note="2'- fluoro-uridine"
  misc_feature 11: /note="2'-O-Methylguanosine"
  misc_feature 12: /note="2'-Fluoro-cytidine"
  misc_feature 13: /note="2'-O-Methyluridine"
  misc_feature 14: /note="2'-Fluoro-guanosine"
  misc_feature 15: /note="2'-O-Methylcytidine"
  misc_feature 16: /note="2'- fluoro-uridine"
  misc_feature 17: /note="2'-O-Methylguanosine"
  misc_feature 18: /note="2'-Fluoro-cytidine"
  misc_feature 19: /note="2'-O-Methyluridine"
  misc_feature 20: /note="2'-Fluoro-guanosine"
  misc_feature 21: /note="2'-O-Methylcytidine"
  misc_feature 22: /note="2'- fluoro-uridine"
  misc_feature 23: /note="Inverted DNA thymine"
ccaugccacugcugcugcugcut

SEQ ID NO: 489 - RNA, 21 nt, Artificial Sequence
  Synthetic Construct
  misc_feature 1: /note="2'-fluoroadenosine"
  misc_feature 2: /note="2'-Fluoro-guanosine"
  misc_feature 3: /note="2'-O-Methylcytidine"
  misc_feature 4: /note="2'-fluoroadenosine"
  misc_feature 5: /note="2'-O-Methylguanosine"
  misc_feature 6: /note="2'-Fluoro-cytidine"
  misc_feature 7: /note="2'-O-Methyladenosine"
  misc_feature 8: /note="2'-Fluoro-guanosine"
  misc_feature 9: /note="2'-O-Methylcytidine"
  misc_feature 10: /note="2'-fluoroadenosine"
  misc_feature 11: /note="2'-O-Methylguanosine"
  misc_feature 12: /note="2'-Fluoro-cytidine"
  misc_feature 13: /note="2'-O-Methyladenosine"
  misc_feature 14: /note="2'-Fluoro-guanosine"
  misc_feature 15: /note="2'-O-Methyluridine"
  misc_feature 16: /note="2'-Fluoro-guanosine"
  misc_feature 17: /note="2'-O-Methylguanosine"
  misc_feature 18: /note="2'-Fluoro-cytidine"
  misc_feature 19: /note="2'-O-Methyladenosine"
  misc_feature 20: /note="DNA thymine"
  misc_feature 21: /note="DNA thymine"
agcagcagcagcaguggcatt

SEQ ID NO: 490 - RNA, 23 nt, Artificial Sequence
  Synthetic Construct
  misc_feature 1: /note="2'-O-Methylcytidine"
  misc_feature 2: /note="2'-O-Methylcytidine"
  misc_feature 3: /note="2'-O-Methyladenosine"
  misc_feature 4: /note="2'-Fluoro-cytidine"
  misc_feature 5: /note="2'-O-Methyladenosine"
  misc_feature 6: /note="2'-Fluoro-cytidine"
  misc_feature 7: /note="2'-O-Methyluridine"
  misc_feature 8: /note="2'-Fluoro-guanosine"
  misc_feature 9: /note="2'-O-Methylcytidine"
  misc_feature 10: /note="2'- fluoro-uridine"
  misc_feature 11: /note="2'-O-Methylguanosine"
  misc_feature 12: /note="2'-Fluoro-cytidine"
  misc_feature 13: /note="2'-O-Methyluridine"
  misc_feature 14: /note="2'-Fluoro-guanosine"
  misc_feature 15: /note="2'-O-Methylcytidine"
  misc_feature 16: /note="2'- fluoro-uridine"
  misc_feature 17: /note="2'-O-Methylguanosine"
  misc_feature 18: /note="2'-Fluoro-cytidine"
  misc_feature 19: /note="2'-O-Methyluridine"
  misc_feature 20: /note="2'-Fluoro-guanosine"
  misc_feature 21: /note="2'-O-Methylcytidine"
  misc_feature 22: /note="2'- fluoro-uridine"
  misc_feature 23: /note="Inverted DNA thymine"
ccacacugcugcugcugcugcut

SEQ ID NO: 491 - RNA, 21 nt, Artificial Sequence
  Synthetic Construct
  misc_feature 1: /note="2'-fluoroadenosine"
  misc_feature 2: /note="2'-Fluoro-guanosine"
  misc_feature 3: /note="2'-O-Methylcytidine"
  misc_feature 4: /note="2'-fluoroadenosine"
  misc_feature 5: /note="2'-O-Methylguanosine"
  misc_feature 6: /note="2'-Fluoro-cytidine"
  misc_feature 7: /note="2'-O-Methyladenosine"
  misc_feature 8: /note="2'-Fluoro-guanosine"
  misc_feature 9: /note="2'-O-Methylcytidine"
  misc_feature 10: /note="2'-fluoroadenosine"
  misc_feature 11: /note="2'-O-Methylguanosine"
  misc_feature 12: /note="2'-Fluoro-cytidine"
  misc_feature 13: /note="2'-O-Methyladenosine"
  misc_feature 14: /note="2'-Fluoro-guanosine"
  misc_feature 15: /note="2'-O-Methylcytidine"
  misc_feature 16: /note="2'-fluoroadenosine"
  misc_feature 17: /note="2'-O-Methylguanosine"
  misc_feature 18: /note="2'- fluoro-uridine"
  misc_feature 19: /note="2'-O-Methylguanosine"
  misc_feature 20: /note="DNA thymine"
  misc_feature 21: /note="DNA thymine"
agcagcagcagcagcagugtt

SEQ ID NO: 492 - RNA, 23 nt, Artificial Sequence
  Synthetic Construct
  misc_feature 1: /note="2'-O-Methylcytidine"
  misc_feature 2: /note="2'-O-Methylcytidine"
  misc_feature 3: /note="2'-O-Methyladenosine"
  misc_feature 4: /note="2'- fluoro-uridine"
  misc_feature 5: /note="2'-O-Methylguanosine"
  misc_feature 6: /note="2'-Fluoro-cytidine"
  misc_feature 7: /note="2'-O-Methyluridine"
  misc_feature 8: /note="2'-Fluoro-guanosine"
  misc_feature 9: /note="2'-O-Methylcytidine"
  misc_feature 10: /note="2'- fluoro-uridine"
  misc_feature 11: /note="2'-O-Methylguanosine"
  misc_feature 12: /note="2'-Fluoro-cytidine"
  misc_feature 13: /note="2'-O-Methyluridine"
  misc_feature 14: /note="2'-Fluoro-guanosine"
  misc_feature 15: /note="2'-O-Methylcytidine"
  misc_feature 16: /note="2'- fluoro-uridine"
  misc_feature 17: /note="2'-O-Methylguanosine"
  misc_feature 18: /note="2'-Fluoro-cytidine"
  misc_feature 19: /note="2'-O-Methyluridine"
  misc_feature 20: /note="2'-Fluoro-cytidine"
  misc_feature 21: /note="2'-O-Methylcytidine"
  misc_feature 22: /note="2'- fluoro-uridine"
  misc_feature 23: /note="Inverted DNA thymine"
ccaugcugcugcugcugcuccut

SEQ ID NO: 493 - RNA, 21 nt, Artificial Sequence
  Synthetic Construct
  misc_feature 1: /note="2'-fluoroadenosine"
  misc_feature 2: /note="2'-Fluoro-guanosine"
  misc_feature 3: /note="2'-O-Methylguanosine"
  misc_feature 4: /note="2'-fluoroadenosine"
  misc_feature 5: /note="2'-O-Methylguanosine"
  misc_feature 6: /note="2'-Fluoro-cytidine"
  misc_feature 7: /note="2'-O-Methyladenosine"
  misc_feature 8: /note="2'-Fluoro-guanosine"
  misc_feature 9: /note="2'-O-Methylcytidine"
  misc_feature 10: /note="2'-fluoroadenosine"
  misc_feature 11: /note="2'-O-Methylguanosine"
  misc_feature 12: /note="2'-Fluoro-cytidine"
  misc_feature 13: /note="2'-O-Methyladenosine"
  misc_feature 14: /note="2'-Fluoro-guanosine"
  misc_feature 15: /note="2'-O-Methylcytidine"
  misc_feature 16: /note="2'-fluoroadenosine"
  misc_feature 17: /note="2'-O-Methylguanosine"
  misc_feature 18: /note="2'-Fluoro-cytidine"
  misc_feature 19: /note="2'-O-Methyladenosine"
  misc_feature 20: /note="DNA thymine"
  misc_feature 21: /note="DNA thymine"
aggagcagcagcagcagcatt

SEQ ID NO: 494 - RNA, 23 nt, Artificial Sequence
  Synthetic Construct
  misc_feature 1: /note="2'-O-Methylcytidine"
  misc_feature 2: /note="2'-O-Methylcytidine"
  misc_feature 3: /note="2'-O-Methyladenosine"
  misc_feature 4: /note="2'-fluoroadenosine"
  misc_feature 5: /note="2'-O-Methylcytidine"
  misc_feature 6: /note="2'-Fluoro-cytidine"
  misc_feature 7: /note="2'-O-Methylcytidine"
  misc_feature 8: /note="2'- fluoro-uridine"
  misc_feature 9: /note="2'-O-Methylguanosine"
  misc_feature 10: /note="2'-fluoroadenosine"
  misc_feature 11: /note="2'-O-Methylcytidine"
  misc_feature 12: /note="2'- fluoro-uridine"
  misc_feature 13: /note="2'-O-Methylguanosine"
  misc_feature 14: /note="2'-Fluoro-guanosine"
  misc_feature 15: /note="2'-O-Methylcytidine"
  misc_feature 16: /note="2'- fluoro-uridine"
  misc_feature 17: /note="2'-O-Methylguanosine"
  misc_feature 18: /note="2'-Fluoro-cytidine"
  misc_feature 19: /note="2'-O-Methyladenosine"
  misc_feature 20: /note="2'-Fluoro-guanosine"
  misc_feature 21: /note="2'-O-Methyluridine"
  misc_feature 22: /note="2'-Fluoro-guanosine"
  misc_feature 23: /note="Inverted DNA thymine"
ccaacccugacuggcugcagugt

SEQ ID NO: 495 - RNA, 21 nt, Artificial Sequence
  Synthetic Construct
  misc_feature 1: /note="2'-Fluoro-cytidine"
  misc_feature 2: /note="2'-fluoroadenosine"
  misc_feature 3: /note="2'-O-Methylcytidine"
  misc_feature 4: /note="2'- fluoro-uridine"
  misc_feature 5: /note="2'-O-Methylguanosine"
  misc_feature 6: /note="2'-Fluoro-cytidine"
  misc_feature 7: /note="2'-O-Methyladenosine"
  misc_feature 8: /note="2'-Fluoro-guanosine"
  misc_feature 9: /note="2'-O-Methylcytidine"
  misc_feature 10: /note="2'-Fluoro-cytidine"
  misc_feature 11: /note="2'-O-Methyladenosine"
  misc_feature 12: /note="2'-Fluoro-guanosine"
  misc_feature 13: /note="2'-O-Methyluridine"
  misc_feature 14: /note="2'-Fluoro-cytidine"
  misc_feature 15: /note="2'-O-Methyladenosine"
  misc_feature 16: /note="2'-Fluoro-guanosine"
  misc_feature 17: /note="2'-O-Methylguanosine"
  misc_feature 18: /note="2'-Fluoro-guanosine"
  misc_feature 19: /note="2'-O-Methyluridine"
  misc_feature 20: /note="DNA thymine"
  misc_feature 21: /note="DNA thymine"
cacugcagccagucagggutt

SEQ ID NO: 496 - RNA, 23 nt, Artificial Sequence
  Synthetic Construct
  misc_feature 1: /note="2'-O-Methylcytidine"
  misc_feature 2: /note="2'-O-Methylcytidine"
  misc_feature 3: /note="2'-O-Methyladenosine"
  misc_feature 4: /note="2'- fluoro-uridine"
  misc_feature 5: /note="2'-O-Methylguanosine"
  misc_feature 6: /note="2'-fluoroadenosine"
  misc_feature 7: /note="2'-O-Methyladenosine"
  misc_feature 8: /note="2'-fluoroadenosine"
  misc_feature 9: /note="2'-O-Methylguanosine"
  misc_feature 10: /note="2'-Fluoro-guanosine"
  misc_feature 11: /note="2'-O-Methyluridine"
  misc_feature 12: /note="2'-Fluoro-guanosine"
  misc_feature 13: /note="2'-O-Methylcytidine"
  misc_feature 14: /note="2'- fluoro-uridine"
  misc_feature 15: /note="2'-O-Methylguanosine"
  misc_feature 16: /note="2'-fluoroadenosine"
  misc_feature 17: /note="2'-O-Methyluridine"
  misc_feature 18: /note="2'-Fluoro-guanosine"
  misc_feature 19: /note="2'-O-Methylguanosine"
  misc_feature 20: /note="2'-Fluoro-cytidine"
  misc_feature 21: /note="2'-O-Methylcytidine"
  misc_feature 22: /note="2'-Fluoro-cytidine"
  misc_feature 23: /note="Inverted DNA thymine"
ccaugaaaggugcugauggccct

SEQ ID NO: 497 - RNA, 21 nt, Artificial Sequence
  Synthetic Construct
  misc_feature 1: /note="2'-Fluoro-guanosine"
  misc_feature 2: /note="2'-Fluoro-guanosine"
  misc_feature 3: /note="2'-O-Methylguanosine"
  misc_feature 4: /note="2'-Fluoro-cytidine"
  misc_feature 5: /note="2'-O-Methylcytidine"
  misc_feature 6: /note="2'-fluoroadenosine"
  misc_feature 7: /note="2'-O-Methyluridine"
  misc_feature 8: /note="2'-Fluoro-cytidine"
  misc_feature 9: /note="2'-O-Methyladenosine"
  misc_feature 10: /note="2'-Fluoro-guanosine"
  misc_feature 11: /note="2'-O-Methylcytidine"
  misc_feature 12: /note="2'-fluoroadenosine"
  misc_feature 13: /note="2'-O-Methylcytidine"
  misc_feature 14: /note="2'-Fluoro-cytidine"
  misc_feature 15: /note="2'-O-Methyluridine"
  misc_feature 16: /note="2'- fluoro-uridine"
  misc_feature 17: /note="2'-O-Methyluridine"
  misc_feature 18: /note="2'-Fluoro-cytidine"
  misc_feature 19: /note="2'-O-Methyladenosine"
  misc_feature 20: /note="DNA thymine"
  misc_feature 21: /note="DNA thymine"
gggccaucagcaccuuucatt

SEQ ID NO: 498 - RNA, 23 nt, Artificial Sequence
  Synthetic Construct
  misc_feature 1: /note="2'-O-Methylcytidine"
  misc_feature 2: /note="2'-O-Methylcytidine"
  misc_feature 3: /note="2'-O-Methyladenosine"
  misc_feature 4: /note="2'-Fluoro-guanosine"
  misc_feature 5: /note="2'-O-Methylguanosine"
  misc_feature 6: /note="2'-Fluoro-cytidine"
  misc_feature 7: /note="2'-O-Methyluridine"
  misc_feature 8: /note="2'-Fluoro-guanosine"
  misc_feature 9: /note="2'-O-Methyluridine"
  misc_feature 10: /note="2'-Fluoro-guanosine"
  misc_feature 11: /note="2'-O-Methylcytidine"
  misc_feature 12: /note="2'-Fluoro-cytidine"
  misc_feature 13: /note="2'-O-Methyluridine"
  misc_feature 14: /note="2'- fluoro-uridine"
  misc_feature 15: /note="2'-O-Methylguanosine"
  misc_feature 16: /note="2'-Fluoro-guanosine"
  misc_feature 17: /note="2'-O-Methyluridine"
  misc_feature 18: /note="2'- fluoro-uridine"
  misc_feature 19: /note="2'-O-Methyluridine"
  misc_feature 20: /note="2'-Fluoro-cytidine"
  misc_feature 21: /note="2'-O-Methylcytidine"
  misc_feature 22: /note="2'- fluoro-uridine"
  misc_feature 23: /note="Inverted DNA thymine"
ccaggcugugccuugguuuccut

SEQ ID NO: 499 - RNA, 21 nt, Artificial Sequence
  Synthetic Construct
  misc_feature 1: /note="2'-fluoroadenosine"
  misc_feature 2: /note="2'-Fluoro-guanosine"
  misc_feature 3: /note="2'-O-Methylguanosine"
  misc_feature 4: /note="2'-fluoroadenosine"
  misc_feature 5: /note="2'-O-Methyladenosine"
  misc_feature 6: /note="2'-fluoroadenosine"
  misc_feature 7: /note="2'-O-Methylcytidine"
  misc_feature 8: /note="2'-Fluoro-cytidine"
  misc_feature 9: /note="2'-O-Methyladenosine"
  misc_feature 10: /note="2'-fluoroadenosine"
  misc_feature 11: /note="2'-O-Methylguanosine"
  misc_feature 12: /note="2'-Fluoro-guanosine"
  misc_feature 13: /note="2'-O-Methylcytidine"
  misc_feature 14: /note="2'-fluoroadenosine"
  misc_feature 15: /note="2'-O-Methylcytidine"
  misc_feature 16: /note="2'-fluoroadenosine"
  misc_feature 17: /note="2'-O-Methylguanosine"
  misc_feature 18: /note="2'-Fluoro-cytidine"
  misc_feature 19: /note="2'-O-Methylcytidine"
  misc_feature 20: /note="DNA thymine"
  misc_feature 21: /note="DNA thymine"
aggaaaccaaggcacagcctt

SEQ ID NO: 500 - RNA, 23 nt, Artificial Sequence
  Synthetic Construct
  misc_feature 1: /note="2'-O-Methylcytidine"
  misc_feature 2: /note="2'-O-Methylcytidine"
  misc_feature 3: /note="2'-O-Methyladenosine"
  misc_feature 4: /note="2'-Fluoro-cytidine"
  misc_feature 5: /note="2'-O-Methyluridine"
  misc_feature 6: /note="2'-Fluoro-guanosine"
  misc_feature 7: /note="2'-O-Methyluridine"
  misc_feature 8: /note="2'-Fluoro-guanosine"
  misc_feature 9: /note="2'-O-Methylcytidine"
  misc_feature 10: /note="2'-Fluoro-cytidine"
  misc_feature 11: /note="2'-O-Methyluridine"
  misc_feature 12: /note="2'- fluoro-uridine"
  misc_feature 13: /note="2'-O-Methylguanosine"
  misc_feature 14: /note="2'-Fluoro-guanosine"
  misc_feature 15: /note="2'-O-Methyluridine"
  misc_feature 16: /note="2'- fluoro-uridine"
  misc_feature 17: /note="2'-O-Methyluridine"
  misc_feature 18: /note="2'-Fluoro-cytidine"
  misc_feature 19: /note="2'-O-Methylcytidine"
  misc_feature 20: /note="2'- fluoro-uridine"
  misc_feature 21: /note="2'-O-Methylguanosine"
  misc_feature 22: /note="2'-fluoroadenosine"
  misc_feature 23: /note="Inverted DNA thymine"
ccacugugccuugguuuccugat

SEQ ID NO: 501 - RNA, 21 nt, Artificial Sequence
  Synthetic Construct
  misc_feature 1: /note="2'- fluoro-uridine"
  misc_feature 2: /note="2'-Fluoro-cytidine"
  misc_feature 3: /note="2'-O-Methyladenosine"
  misc_feature 4: /note="2'-Fluoro-guanosine"
  misc_feature 5: /note="2'-O-Methylguanosine"
  misc_feature 6: /note="2'-fluoroadenosine"
  misc_feature 7: /note="2'-O-Methyladenosine"
  misc_feature 8: /note="2'-fluoroadenosine"
  misc_feature 9: /note="2'-O-Methylcytidine"
  misc_feature 10: /note="2'-Fluoro-cytidine"
  misc_feature 11: /note="2'-O-Methyladenosine"
  misc_feature 12: /note="2'-fluoroadenosine"
  misc_feature 13: /note="2'-O-Methylguanosine"
  misc_feature 14: /note="2'-Fluoro-guanosine"
  misc_feature 15: /note="2'-O-Methylcytidine"
  misc_feature 16: /note="2'-fluoroadenosine"
  misc_feature 17: /note="2'-O-Methylcytidine"
  misc_feature 18: /note="2'-fluoroadenosine"
  misc_feature 19: /note="2'-O-Methylguanosine"
  misc_feature 20: /note="DNA thymine"
  misc_feature 21: /note="DNA thymine"
ucaggaaaccaaggcacagtt

SEQ ID NO: 502 - RNA, 23 nt, Artificial Sequence
  Synthetic Construct
  misc_feature 1: /note="2'-O-Methylcytidine"
  misc_feature 2: /note="2'-O-Methylcytidine"
  misc_feature 3: /note="2'-O-Methyladenosine"
  misc_feature 4: /note="2'-Fluoro-guanosine"
  misc_feature 5: /note="2'-O-Methylguanosine"
  misc_feature 6: /note="2'-fluoroadenosine"
  misc_feature 7: /note="2'-O-Methyladenosine"
  misc_feature 8: /note="2'-Fluoro-guanosine"
  misc_feature 9: /note="2'-O-Methyladenosine"
  misc_feature 10: /note="2'-fluoroadenosine"
  misc_feature 11: /note="2'-O-Methyladenosine"
  misc_feature 12: /note="2'-Fluoro-cytidine"
  misc_feature 13: /note="2'-O-Methylcytidine"
  misc_feature 14: /note="2'- fluoro-uridine"
  misc_feature 15: /note="2'-O-Methylguanosine"
  misc_feature 16: /note="2'-Fluoro-guanosine"
  misc_feature 17: /note="2'-O-Methyladenosine"
  misc_feature 18: /note="2'-fluoroadenosine"
  misc_feature 19: /note="2'-O-Methylcytidine"
  misc_feature 20: /note="2'-Fluoro-cytidine"
  misc_feature 21: /note="2'-O-Methyladenosine"
  misc_feature 22: /note="2'-Fluoro-guanosine"
  misc_feature 23: /note="Inverted DNA thymine"
ccaggaagaaaccuggaaccagt

SEQ ID NO: 503 - RNA, 21 nt, Artificial Sequence
  Synthetic Construct
  misc_feature 1: /note="2'-Fluoro-cytidine"
  misc_feature 2: /note="2'- fluoro-uridine"
  misc_feature 3: /note="2'-O-Methylguanosine"
  misc_feature 4: /note="2'-Fluoro-guanosine"
  misc_feature 5: /note="2'-O-Methyluridine"
  misc_feature 6: /note="2'- fluoro-uridine"
  misc_feature 7: /note="2'-O-Methylcytidine"
  misc_feature 8: /note="2'-Fluoro-cytidine"
  misc_feature 9: /note="2'-O-Methyladenosine"
  misc_feature 10: /note="2'-Fluoro-guanosine"
  misc_feature 11: /note="2'-O-Methylguanosine"
  misc_feature 12: /note="2'- fluoro-uridine"
  misc_feature 13: /note="2'-O-Methyluridine"
  misc_feature 14: /note="2'- fluoro-uridine"
  misc_feature 15: /note="2'-O-Methylcytidine"
  misc_feature 16: /note="2'- fluoro-uridine"
  misc_feature 17: /note="2'-O-Methyluridine"
  misc_feature 18: /note="2'-Fluoro-cytidine"
  misc_feature 19: /note="2'-O-Methylcytidine"
  misc_feature 20: /note="DNA thymine"
  misc_feature 21: /note="DNA thymine"
cugguuccagguuucuucctt

SEQ ID NO: 504 - RNA, 23 nt, Artificial Sequence
  Synthetic Construct
  misc_feature 1: /note="2'-O-Methylcytidine"
  misc_feature 2: /note="2'-O-Methylcytidine"
  misc_feature 3: /note="2'-O-Methyladenosine"
  misc_feature 4: /note="2'-fluoroadenosine"
  misc_feature 5: /note="2'-O-Methyladenosine"
  misc_feature 6: /note="2'-Fluoro-guanosine"
  misc_feature 7: /note="2'-O-Methyladenosine"
  misc_feature 8: /note="2'-fluoroadenosine"
  misc_feature 9: /note="2'-O-Methyladenosine"
  misc_feature 10: /note="2'-Fluoro-cytidine"
  misc_feature 11: /note="2'-O-Methylcytidine"
  misc_feature 12: /note="2'- fluoro-uridine"
  misc_feature 13: /note="2'-O-Methylguanosine"
  misc_feature 14: /note="2'-Fluoro-guanosine"
  misc_feature 15: /note="2'-O-Methyladenosine"
  misc_feature 16: /note="2'-fluoroadenosine"
  misc_feature 17: /note="2'-O-Methylcytidine"
  misc_feature 18: /note="2'-Fluoro-cytidine"
  misc_feature 19: /note="2'-O-Methyladenosine"
  misc_feature 20: /note="2'-Fluoro-guanosine"
  misc_feature 21: /note="2'-O-Methyladenosine"
  misc_feature 22: /note="2'-Fluoro-guanosine"
  misc_feature 23: /note="Inverted DNA thymine"
ccaaagaaaccuggaaccagagt

SEQ ID NO: 505 - RNA, 21 nt, Artificial Sequence
  Synthetic Construct
  misc_feature 1: /note="2'-Fluoro-cytidine"
  misc_feature 2: /note="2'- fluoro-uridine"
  misc_feature 3: /note="2'-O-Methylcytidine"
  misc_feature 4: /note="2'- fluoro-uridine"
  misc_feature 5: /note="2'-O-Methylguanosine"
  misc_feature 6: /note="2'-Fluoro-guanosine"
  misc_feature 7: /note="2'-O-Methyluridine"
  misc_feature 8: /note="2'- fluoro-uridine"
  misc_feature 9: /note="2'-O-Methylcytidine"
  misc_feature 10: /note="2'-Fluoro-cytidine"
  misc_feature 11: /note="2'-O-Methyladenosine"
  misc_feature 12: /note="2'-Fluoro-guanosine"
  misc_feature 13: /note="2'-O-Methylguanosine"
  misc_feature 14: /note="2'- fluoro-uridine"
  misc_feature 15: /note="2'-O-Methyluridine"
  misc_feature 16: /note="2'- fluoro-uridine"
  misc_feature 17: /note="2'-O-Methylcytidine"
  misc_feature 18: /note="2'- fluoro-uridine"
  misc_feature 19: /note="2'-O-Methyluridine"
  misc_feature 20: /note="DNA thymine"
  misc_feature 21: /note="DNA thymine"
cucugguuccagguuucuutt

SEQ ID NO: 506 - RNA, 23 nt, Artificial Sequence
  Synthetic Construct
  misc_feature 1: /note="2'-O-Methylcytidine"
  misc_feature 2: /note="2'-O-Methylcytidine"
  misc_feature 3: /note="2'-O-Methyladenosine"
  misc_feature 4: /note="2'-fluoroadenosine"
  misc_feature 5: /note="2'-O-Methylguanosine"
  misc_feature 6: /note="2'-fluoroadenosine"
  misc_feature 7: /note="2'-O-Methyladenosine"
  misc_feature 8: /note="2'-fluoroadenosine"
  misc_feature 9: /note="2'-O-Methylcytidine"
  misc_feature 10: /note="2'-Fluoro-cytidine"
  misc_feature 11: /note="2'-O-Methyluridine"
  misc_feature 12: /note="2'-Fluoro-guanosine"
  misc_feature 13: /note="2'-O-Methylguanosine"
  misc_feature 14: /note="2'-fluoroadenosine"
  misc_feature 15: /note="2'-O-Methyladenosine"
  misc_feature 16: /note="2'-Fluoro-cytidine"
  misc_feature 17: /note="2'-O-Methylcytidine"
  misc_feature 18: /note="2'-fluoroadenosine"
  misc_feature 19: /note="2'-O-Methylguanosine"
  misc_feature 20: /note="2'-fluoroadenosine"
  misc_feature 21: /note="2'-O-Methylguanosine"
  misc_feature 22: /note="2'-Fluoro-guanosine"
  misc_feature 23: /note="Inverted DNA thymine"
ccaagaaaccuggaaccagaggt

SEQ ID NO: 507 - RNA, 21 nt, Artificial Sequence
  Synthetic Construct
  misc_feature 1: /note="2'-Fluoro-cytidine"
  misc_feature 2: /note="2'-Fluoro-cytidine"
  misc_feature 3: /note="2'-O-Methyluridine"
  misc_feature 4: /note="2'-Fluoro-cytidine"
  misc_feature 5: /note="2'-O-Methyluridine"
  misc_feature 6: /note="2'-Fluoro-guanosine"
  misc_feature 7: /note="2'-O-Methylguanosine"
  misc_feature 8: /note="2'- fluoro-uridine"
  misc_feature 9: /note="2'-O-Methyluridine"
  misc_feature 10: /note="2'-Fluoro-cytidine"
  misc_feature 11: /note="2'-O-Methylcytidine"
  misc_feature 12: /note="2'-fluoroadenosine"
  misc_feature 13: /note="2'-O-Methylguanosine"
  misc_feature 14: /note="2'-Fluoro-guanosine"
  misc_feature 15: /note="2'-O-Methyluridine"
  misc_feature 16: /note="2'- fluoro-uridine"
  misc_feature 17: /note="2'-O-Methyluridine"
  misc_feature 18: /note="2'-Fluoro-cytidine"
  misc_feature 19: /note="2'-O-Methyluridine"
  misc_feature 20: /note="DNA thymine"
  misc_feature 21: /note="DNA thymine"
ccucugguuccagguuucutt

SEQ ID NO: 508 - RNA, 23 nt, Artificial Sequence
  Synthetic Construct
  misc_feature 1: /note="2'-O-Methylcytidine"
  misc_feature 2: /note="2'-O-Methylcytidine"
  misc_feature 3: /note="2'-O-Methyladenosine"
  misc_feature 4: /note="2'-fluoroadenosine"
  misc_feature 5: /note="2'-O-Methyladenosine"
  misc_feature 6: /note="2'-Fluoro-cytidine"
  misc_feature 7: /note="2'-O-Methylcytidine"
  misc_feature 8: /note="2'- fluoro-uridine"
  misc_feature 9: /note="2'-O-Methylguanosine"
  misc_feature 10: /note="2'-Fluoro-guanosine"
  misc_feature 11: /note="2'-O-Methyladenosine"
  misc_feature 12: /note="2'-fluoroadenosine"
  misc_feature 13: /note="2'-O-Methylcytidine"
  misc_feature 14: /note="2'-Fluoro-cytidine"
  misc_feature 15: /note="2'-O-Methyladenosine"
  misc_feature 16: /note="2'-Fluoro-guanosine"
  misc_feature 17: /note="2'-O-Methyladenosine"
  misc_feature 18: /note="2'-Fluoro-guanosine"
  misc_feature 19: /note="2'-O-Methylguanosine"
  misc_feature 20: /note="2'-Fluoro-guanosine"
  misc_feature 21: /note="2'-O-Methylguanosine"
  misc_feature 22: /note="2'-Fluoro-guanosine"
  misc_feature 23: /note="Inverted DNA thymine"
ccaaaccuggaaccagagggggt

SEQ ID NO: 509 - RNA, 21 nt, Artificial Sequence
  Synthetic Construct
  misc_feature 1: /note="2'-Fluoro-cytidine"
  misc_feature 2: /note="2'-Fluoro-cytidine"
  misc_feature 3: /note="2'-O-Methylcytidine"
  misc_feature 4: /note="2'-Fluoro-cytidine"
  misc_feature 5: /note="2'-O-Methylcytidine"
  misc_feature 6: /note="2'- fluoro-uridine"
  misc_feature 7: /note="2'-O-Methylcytidine"
  misc_feature 8: /note="2'- fluoro-uridine"
  misc_feature 9: /note="2'-O-Methylguanosine"
  misc_feature 10: /note="2'-Fluoro-guanosine"
  misc_feature 11: /note="2'-O-Methyluridine"
  misc_feature 12: /note="2'- fluoro-uridine"
  misc_feature 13: /note="2'-O-Methylcytidine"
  misc_feature 14: /note="2'-Fluoro-cytidine"
  misc_feature 15: /note="2'-O-Methyladenosine"
  misc_feature 16: /note="2'-Fluoro-guanosine"
  misc_feature 17: /note="2'-O-Methylguanosine"
  misc_feature 18: /note="2'- fluoro-uridine"
  misc_feature 19: /note="2'-O-Methyluridine"
  misc_feature 20: /note="DNA thymine"
  misc_feature 21: /note="DNA thymine"
cccccucugguuccagguutt

SEQ ID NO: 510 - RNA, 23 nt, Artificial Sequence
  Synthetic Construct
  misc_feature 1: /note="2'-O-Methylcytidine"
  misc_feature 2: /note="2'-O-Methylcytidine"
  misc_feature 3: /note="2'-O-Methyladenosine"
  misc_feature 4: /note="2'-Fluoro-cytidine"
  misc_feature 5: /note="2'-O-Methyladenosine"
  misc_feature 6: /note="2'- fluoro-uridine"
  misc_feature 7: /note="2'-O-Methyluridine"
  misc_feature 8: /note="2'- fluoro-uridine"
  misc_feature 9: /note="2'-O-Methyluridine"
  misc_feature 10: /note="2'- fluoro-uridine"
  misc_feature 11: /note="2'-O-Methyladenosine"
  misc_feature 12: /note="2'- fluoro-uridine"
  misc_feature 13: /note="2'-O-Methyluridine"
  misc_feature 14: /note="2'-fluoroadenosine"
  misc_feature 15: /note="2'-O-Methyladenosine"
  misc_feature 16: /note="2'- fluoro-uridine"
  misc_feature 17: /note="2'-O-Methyladenosine"
  misc_feature 18: /note="2'- fluoro-uridine"
  misc_feature 19: /note="2'-O-Methylguanosine"
  misc_feature 20: /note="2'-Fluoro-guanosine"
  misc_feature 21: /note="2'-O-Methyluridine"
  misc_feature 22: /note="2'-Fluoro-guanosine"
  misc_feature 23: /note="Inverted DNA thymine"
ccacauuuuuauuaauauggugt

SEQ ID NO: 511 - RNA, 21 nt, Artificial Sequence
  Synthetic Construct
  misc_feature 1: /note="2'-Fluoro-cytidine"
  misc_feature 2: /note="2'-fluoroadenosine"
  misc_feature 3: /note="2'-O-Methylcytidine"
  misc_feature 4: /note="2'-Fluoro-cytidine"
  misc_feature 5: /note="2'-O-Methyladenosine"
  misc_feature 6: /note="2'- fluoro-uridine"
  misc_feature 7: /note="2'-O-Methyladenosine"
  misc_feature 8: /note="2'- fluoro-uridine"
  misc_feature 9: /note="2'-O-Methyluridine"
  misc_feature 10: /note="2'-fluoroadenosine"
  misc_feature 11: /note="2'-O-Methyladenosine"
  misc_feature 12: /note="2'- fluoro-uridine"
  misc_feature 13: /note="2'-O-Methyladenosine"
  misc_feature 14: /note="2'-fluoroadenosine"
  misc_feature 15: /note="2'-O-Methyladenosine"
  misc_feature 16: /note="2'-fluoroadenosine"
  misc_feature 17: /note="2'-O-Methyladenosine"
  misc_feature 18: /note="2'- fluoro-uridine"
  misc_feature 19: /note="2'-O-Methylguanosine"
  misc_feature 20: /note="DNA thymine"
  misc_feature 21: /note="DNA thymine"
caccauauuaauaaaaaugtt

SEQ ID NO: 512 - RNA, 23 nt, Artificial Sequence
  Synthetic Construct
  misc_feature 1: /note="2'-O-Methylcytidine"
  misc_feature 2: /note="2'-O-Methylcytidine"
  misc_feature 3: /note="2'-O-Methyladenosine"
  misc_feature 4: /note="2'-fluoroadenosine"
  misc_feature 5: /note="2'-O-Methyluridine"
  misc_feature 6: /note="2'- fluoro-uridine"
  misc_feature 7: /note="2'-O-Methyluridine"
  misc_feature 8: /note="2'- fluoro-uridine"
  misc_feature 9: /note="2'-O-Methyluridine"
  misc_feature 10: /note="2'-fluoroadenosine"
  misc_feature 11: /note="2'-O-Methyluridine"
  misc_feature 12: /note="2'- fluoro-uridine"
  misc_feature 13: /note="2'-O-Methyladenosine"
  misc_feature 14: /note="2'-fluoroadenosine"
  misc_feature 15: /note="2'-O-Methyluridine"
  misc_feature 16: /note="2'-fluoroadenosine"
  misc_feature 17: /note="2'-O-Methyluridine"
  misc_feature 18: /note="2'-Fluoro-guanosine"
  misc_feature 19: /note="2'-O-Methylguanosine"
  misc_feature 20: /note="2'- fluoro-uridine"
  misc_feature 21: /note="2'-O-Methylguanosine"
  misc_feature 22: /note="2'-fluoroadenosine"
  misc_feature 23: /note="Inverted DNA thymine"
ccaauuuuuauuaauauggugat

SEQ ID NO: 513 - RNA, 21 nt, Artificial Sequence
  Synthetic Construct
  misc_feature 1: /note="2'- fluoro-uridine"
  misc_feature 2: /note="2'-Fluoro-cytidine"
  misc_feature 3: /note="2'-O-Methyladenosine"
  misc_feature 4: /note="2'-Fluoro-cytidine"
  misc_feature 5: /note="2'-O-Methylcytidine"
  misc_feature 6: /note="2'-fluoroadenosine"
  misc_feature 7: /note="2'-O-Methyluridine"
  misc_feature 8: /note="2'-fluoroadenosine"
  misc_feature 9: /note="2'-O-Methyluridine"
  misc_feature 10: /note="2'- fluoro-uridine"
  misc_feature 11: /note="2'-O-Methyladenosine"
  misc_feature 12: /note="2'-fluoroadenosine"
  misc_feature 13: /note="2'-O-Methyluridine"
  misc_feature 14: /note="2'-fluoroadenosine"
  misc_feature 15: /note="2'-O-Methyladenosine"
  misc_feature 16: /note="2'-fluoroadenosine"
  misc_feature 17: /note="2'-O-Methyladenosine"
  misc_feature 18: /note="2'-fluoroadenosine"
  misc_feature 19: /note="2'-O-Methyluridine"
  misc_feature 20: /note="DNA thymine"
  misc_feature 21: /note="DNA thymine"
ucaccauauuaauaaaaautt

SEQ ID NO: 514 - RNA, 23 nt, Artificial Sequence
  Synthetic Construct
  misc_feature 1: /note="2'-O-Methylcytidine"
  misc_feature 2: /note="2'-O-Methylcytidine"
  misc_feature 3: /note="2'-O-Methyladenosine"
  misc_feature 4: /note="2'-fluoroadenosine"
  misc_feature 5: /note="2'-O-Methyladenosine"
  misc_feature 6: /note="2'- fluoro-uridine"
  misc_feature 7: /note="2'-O-Methyladenosine"
  misc_feature 8: /note="2'- fluoro-uridine"
  misc_feature 9: /note="2'-O-Methylguanosine"
  misc_feature 10: /note="2'-Fluoro-guanosine"
  misc_feature 11: /note="2'-O-Methyluridine"
  misc_feature 12: /note="2'-Fluoro-guanosine"
  misc_feature 13: /note="2'-O-Methyladenosine"
  misc_feature 14: /note="2'-Fluoro-cytidine"
  misc_feature 15: /note="2'-O-Methyluridine"
  misc_feature 16: /note="2'- fluoro-uridine"
  misc_feature 17: /note="2'-O-Methyluridine"
  misc_feature 18: /note="2'- fluoro-uridine"
  misc_feature 19: /note="2'-O-Methyluridine"
  misc_feature 20: /note="2'-fluoroadenosine"
  misc_feature 21: /note="2'-O-Methyladenosine"
  misc_feature 22: /note="2'-fluoroadenosine"
  misc_feature 23: /note="Inverted DNA thymine"
ccaaauauggugacuuuuuaaat

SEQ ID NO: 515 - RNA, 21 nt, Artificial Sequence
  Synthetic Construct
  misc_feature 1: /note="2'- fluoro-uridine"
  misc_feature 2: /note="2'- fluoro-uridine"
  misc_feature 3: /note="2'-O-Methyluridine"
  misc_feature 4: /note="2'-fluoroadenosine"
  misc_feature 5: /note="2'-O-Methyladenosine"
  misc_feature 6: /note="2'-fluoroadenosine"
  misc_feature 7: /note="2'-O-Methyladenosine"
  misc_feature 8: /note="2'-fluoroadenosine"
  misc_feature 9: /note="2'-O-Methylguanosine"
  misc_feature 10: /note="2'- fluoro-uridine"
  misc_feature 11: /note="2'-O-Methylcytidine"
  misc_feature 12: /note="2'-fluoroadenosine"
  misc_feature 13: /note="2'-O-Methylcytidine"
  misc_feature 14: /note="2'-Fluoro-cytidine"
  misc_feature 15: /note="2'-O-Methyladenosine"
  misc_feature 16: /note="2'- fluoro-uridine"
  misc_feature 17: /note="2'-O-Methyladenosine"
  misc_feature 18: /note="2'- fluoro-uridine"
  misc_feature 19: /note="2'-O-Methyluridine"
  misc_feature 20: /note="DNA thymine"
  misc_feature 21: /note="DNA thymine"
uuuaaaaagucaccauauutt

SEQ ID NO: 516 - RNA, 23 nt, Artificial Sequence
  Synthetic Construct
  misc_feature 1: /note="2'-O-Methylcytidine"
  misc_feature 2: /note="2'-O-Methylcytidine"
  misc_feature 3: /note="2'-O-Methyladenosine"
  misc_feature 4: /note="2'-fluoroadenosine"
  misc_feature 5: /note="2'-O-Methyluridine"
  misc_feature 6: /note="2'-fluoroadenosine"
  misc_feature 7: /note="2'-O-Methyluridine"
  misc_feature 8: /note="2'-Fluoro-guanosine"
  misc_feature 9: /note="2'-O-Methylguanosine"
  misc_feature 10: /note="2'- fluoro-uridine"
  misc_feature 11: /note="2'-O-Methylguanosine"
  misc_feature 12: /note="2'-fluoroadenosine"
  misc_feature 13: /note="2'-O-Methylcytidine"
  misc_feature 14: /note="2'- fluoro-uridine"
  misc_feature 15: /note="2'-O-Methyluridine"
  misc_feature 16: /note="2'- fluoro-uridine"
  misc_feature 17: /note="2'-O-Methyluridine"
  misc_feature 18: /note="2'- fluoro-uridine"
  misc_feature 19: /note="2'-O-Methyladenosine"
  misc_feature 20: /note="2'-fluoroadenosine"
  misc_feature 21: /note="2'-O-Methyladenosine"
  misc_feature 22: /note="2'-fluoroadenosine"
  misc_feature 23: /note="Inverted DNA thymine"
ccaauauggugacuuuuuaaaat

SEQ ID NO: 517 - RNA, 21 nt, Artificial Sequence
  Synthetic Construct
  misc_feature 1: /note="2'- fluoro-uridine"
  misc_feature 2: /note="2'- fluoro-uridine"
  misc_feature 3: /note="2'-O-Methyluridine"
  misc_feature 4: /note="2'- fluoro-uridine"
  misc_feature 5: /note="2'-O-Methyladenosine"
  misc_feature 6: /note="2'-fluoroadenosine"
  misc_feature 7: /note="2'-O-Methyladenosine"
  misc_feature 8: /note="2'-fluoroadenosine"
  misc_feature 9: /note="2'-O-Methyladenosine"
  misc_feature 10: /note="2'-Fluoro-guanosine"
  misc_feature 11: /note="2'-O-Methyluridine"
  misc_feature 12: /note="2'-Fluoro-cytidine"
  misc_feature 13: /note="2'-O-Methyladenosine"
  misc_feature 14: /note="2'-Fluoro-cytidine"
  misc_feature 15: /note="2'-O-Methylcytidine"
  misc_feature 16: /note="2'-fluoroadenosine"
  misc_feature 17: /note="2'-O-Methyluridine"
  misc_feature 18: /note="2'-fluoroadenosine"
  misc_feature 19: /note="2'-O-Methyluridine"
  misc_feature 20: /note="DNA thymine"
  misc_feature 21: /note="DNA thymine"
uuuuaaaaagucaccauautt

SEQ ID NO: 518 - RNA, 23 nt, Artificial Sequence
  Synthetic Construct
  misc_feature 1: /note="2'-O-Methylcytidine"
  misc_feature 2: /note="2'-O-Methylcytidine"
  misc_feature 3: /note="2'-O-Methyladenosine"
  misc_feature 4: /note="2'-fluoroadenosine"
  misc_feature 5: /note="2'-O-Methyluridine"
  misc_feature 6: /note="2'-Fluoro-guanosine"
  misc_feature 7: /note="2'-O-Methylguanosine"
  misc_feature 8: /note="2'- fluoro-uridine"
  misc_feature 9: /note="2'-O-Methylguanosine"
  misc_feature 10: /note="2'-fluoroadenosine"
  misc_feature 11: /note="2'-O-Methylcytidine"
  misc_feature 12: /note="2'- fluoro-uridine"
  misc_feature 13: /note="2'-O-Methyluridine"
  misc_feature 14: /note="2'- fluoro-uridine"
  misc_feature 15: /note="2'-O-Methyluridine"
  misc_feature 16: /note="2'- fluoro-uridine"
  misc_feature 17: /note="2'-O-Methyladenosine"
  misc_feature 18: /note="2'-fluoroadenosine"
  misc_feature 19: /note="2'-O-Methyladenosine"
  misc_feature 20: /note="2'-fluoroadenosine"
  misc_feature 21: /note="2'-O-Methyluridine"
  misc_feature 22: /note="2'-fluoroadenosine"
  misc_feature 23: /note="Inverted DNA thymine"
ccaauggugacuuuuuaaaauat

SEQ ID NO: 519 - RNA, 21 nt, Artificial Sequence
  Synthetic Construct
  misc_feature 1: /note="2'- fluoro-uridine"
  misc_feature 2: /note="2'-fluoroadenosine"
  misc_feature 3: /note="2'-O-Methyluridine"
  misc_feature 4: /note="2'- fluoro-uridine"
  misc_feature 5: /note="2'-O-Methyluridine"
  misc_feature 6: /note="2'- fluoro-uridine"
  misc_feature 7: /note="2'-O-Methyladenosine"
  misc_feature 8: /note="2'-fluoroadenosine"
  misc_feature 9: /note="2'-O-Methyladenosine"
  misc_feature 10: /note="2'-fluoroadenosine"
  misc_feature 11: /note="2'-O-Methyladenosine"
  misc_feature 12: /note="2'-Fluoro-guanosine"
  misc_feature 13: /note="2'-O-Methyluridine"
  misc_feature 14: /note="2'-Fluoro-cytidine"
  misc_feature 15: /note="2'-O-Methyladenosine"
  misc_feature 16: /note="2'-Fluoro-cytidine"
  misc_feature 17: /note="2'-O-Methylcytidine"
  misc_feature 18: /note="2'-fluoroadenosine"
  misc_feature 19: /note="2'-O-Methyluridine"
  misc_feature 20: /note="DNA thymine"
  misc_feature 21: /note="DNA thymine"
uauuuuaaaaagucaccautt

SEQ ID NO: 520 - RNA, 23 nt, Artificial Sequence
  Synthetic Construct
  misc_feature 1: /note="2'-O-Methylcytidine"
  misc_feature 2: /note="2'-O-Methylcytidine"
  misc_feature 3: /note="2'-O-Methyladenosine"
  misc_feature 4: /note="2'- fluoro-uridine"
  misc_feature 5: /note="2'-O-Methylguanosine"
  misc_feature 6: /note="2'-Fluoro-guanosine"
  misc_feature 7: /note="2'-O-Methyluridine"
  misc_feature 8: /note="2'-Fluoro-guanosine"
  misc_feature 9: /note="2'-O-Methyladenosine"
  misc_feature 10: /note="2'-Fluoro-cytidine"
  misc_feature 11: /note="2'-O-Methyluridine"
  misc_feature 12: /note="2'- fluoro-uridine"
  misc_feature 13: /note="2'-O-Methyluridine"
  misc_feature 14: /note="2'- fluoro-uridine"
  misc_feature 15: /note="2'-O-Methyluridine"
  misc_feature 16: /note="2'-fluoroadenosine"
  misc_feature 17: /note="2'-O-Methyladenosine"
  misc_feature 18: /note="2'-fluoroadenosine"
  misc_feature 19: /note="2'-O-Methyladenosine"
  misc_feature 20: /note="2'- fluoro-uridine"
  misc_feature 21: /note="2'-O-Methyladenosine"
  misc_feature 22: /note="2'-fluoroadenosine"
  misc_feature 23: /note="Inverted DNA thymine"
ccauggugacuuuuuaaaauaat

SEQ ID NO: 521 - RNA, 21 nt, Artificial Sequence
  Synthetic Construct
  misc_feature 1: /note="2'- fluoro-uridine"
  misc_feature 2: /note="2'- fluoro-uridine"
  misc_feature 3: /note="2'-O-Methyladenosine"
  misc_feature 4: /note="2'- fluoro-uridine"
  misc_feature 5: /note="2'-O-Methyluridine"
  misc_feature 6: /note="2'- fluoro-uridine"
  misc_feature 7: /note="2'-O-Methyluridine"
  misc_feature 8: /note="2'-fluoroadenosine"
  misc_feature 9: /note="2'-O-Methyladenosine"
  misc_feature 10: /note="2'-fluoroadenosine"
  misc_feature 11: /note="2'-O-Methyladenosine"
  misc_feature 12: /note="2'-fluoroadenosine"
  misc_feature 13: /note="2'-O-Methylguanosine"
  misc_feature 14: /note="2'- fluoro-uridine"
  misc_feature 15: /note="2'-O-Methylcytidine"
  misc_feature 16: /note="2'-fluoroadenosine"
  misc_feature 17: /note="2'-O-Methylcytidine"
  misc_feature 18: /note="2'-Fluoro-cytidine"
  misc_feature 19: /note="2'-O-Methyladenosine"
  misc_feature 20: /note="DNA thymine"
  misc_feature 21: /note="DNA thymine"
uuauuuuaaaaagucaccatt

SEQ ID NO: 522 - RNA, 23 nt, Artificial Sequence
  Synthetic Construct
  misc_feature 1: /note="2'-O-Methylcytidine"
  misc_feature 2: /note="2'-O-Methylcytidine"
  misc_feature 3: /note="2'-O-Methyladenosine"
  misc_feature 4: /note="2'-Fluoro-guanosine"
  misc_feature 5: /note="2'-O-Methylguanosine"
  misc_feature 6: /note="2'- fluoro-uridine"
  misc_feature 7: /note="2'-O-Methylguanosine"
  misc_feature 8: /note="2'-fluoroadenosine"
  misc_feature 9: /note="2'-O-Methylcytidine"
  misc_feature 10: /note="2'- fluoro-uridine"
  misc_feature 11: /note="2'-O-Methyluridine"
  misc_feature 12: /note="2'- fluoro-uridine"
  misc_feature 13: /note="2'-O-Methyluridine"
  misc_feature 14: /note="2'- fluoro-uridine"
  misc_feature 15: /note="2'-O-Methyladenosine"
  misc_feature 16: /note="2'-fluoroadenosine"
  misc_feature 17: /note="2'-O-Methyladenosine"
  misc_feature 18: /note="2'-fluoroadenosine"
  misc_feature 19: /note="2'-O-Methyluridine"
  misc_feature 20: /note="2'-fluoroadenosine"
  misc_feature 21: /note="2'-O-Methyladenosine"
  misc_feature 22: /note="2'-fluoroadenosine"
  misc_feature 23: /note="Inverted DNA thymine"
ccaggugacuuuuuaaaauaaat

SEQ ID NO: 523 - RNA, 21 nt, Artificial Sequence
  Synthetic Construct
  misc_feature 1: /note="2'- fluoro-uridine"
  misc_feature 2: /note="2'- fluoro-uridine"
  misc_feature 3: /note="2'-O-Methyluridine"
  misc_feature 4: /note="2'-fluoroadenosine"
  misc_feature 5: /note="2'-O-Methyluridine"
  misc_feature 6: /note="2'- fluoro-uridine"
  misc_feature 7: /note="2'-O-Methyluridine"
  misc_feature 8: /note="2'- fluoro-uridine"
  misc_feature 9: /note="2'-O-Methyladenosine"
  misc_feature 10: /note="2'-fluoroadenosine"
  misc_feature 11: /note="2'-O-Methyladenosine"
  misc_feature 12: /note="2'-fluoroadenosine"
  misc_feature 13: /note="2'-O-Methyladenosine"
  misc_feature 14: /note="2'-Fluoro-guanosine"
  misc_feature 15: /note="2'-O-Methyluridine"
  misc_feature 16: /note="2'-Fluoro-cytidine"
  misc_feature 17: /note="2'-O-Methyladenosine"
  misc_feature 18: /note="2'-Fluoro-cytidine"
  misc_feature 19: /note="2'-O-Methylcytidine"
  misc_feature 20: /note="DNA thymine"
  misc_feature 21: /note="DNA thymine"
uuuauuuuaaaaagucacctt

SEQ ID NO: 524 - RNA, 23 nt, Artificial Sequence
  Synthetic Construct
  misc_feature 1: /note="2'-O-Methylcytidine"
  misc_feature 2: /note="2'-O-Methylcytidine"
  misc_feature 3: /note="2'-O-Methyladenosine"
  misc_feature 4: /note="2'-Fluoro-guanosine"
  misc_feature 5: /note="2'-O-Methyluridine"
  misc_feature 6: /note="2'-Fluoro-guanosine"
  misc_feature 7: /note="2'-O-Methyladenosine"
  misc_feature 8: /note="2'-Fluoro-cytidine"
  misc_feature 9: /note="2'-O-Methyluridine"
  misc_feature 10: /note="2'- fluoro-uridine"
  misc_feature 11: /note="2'-O-Methyluridine"
  misc_feature 12: /note="2'- fluoro-uridine"
  misc_feature 13: /note="2'-O-Methyluridine"
  misc_feature 14: /note="2'-fluoroadenosine"
  misc_feature 15: /note="2'-O-Methyladenosine"
  misc_feature 16: /note="2'-fluoroadenosine"
  misc_feature 17: /note="2'-O-Methyladenosine"
  misc_feature 18: /note="2'- fluoro-uridine"
  misc_feature 19: /note="2'-O-Methyladenosine"
  misc_feature 20: /note="2'-fluoroadenosine"
  misc_feature 21: /note="2'-O-Methyladenosine"
  misc_feature 22: /note="2'-fluoroadenosine"
  misc_feature 23: /note="Inverted DNA thymine"
ccagugacuuuuuaaaauaaaat

SEQ ID NO: 525 - RNA, 21 nt, Artificial Sequence
  Synthetic Construct
  misc_feature 1: /note="2'- fluoro-uridine"
  misc_feature 2: /note="2'- fluoro-uridine"
  misc_feature 3: /note="2'-O-Methyluridine"
  misc_feature 4: /note="2'- fluoro-uridine"
  misc_feature 5: /note="2'-O-Methyladenosine"
  misc_feature 6: /note="2'- fluoro-uridine"
  misc_feature 7: /note="2'-O-Methyluridine"
  misc_feature 8: /note="2'- fluoro-uridine"
  misc_feature 9: /note="2'-O-Methyluridine"
  misc_feature 10: /note="2'-fluoroadenosine"
  misc_feature 11: /note="2'-O-Methyladenosine"
  misc_feature 12: /note="2'-fluoroadenosine"
  misc_feature 13: /note="2'-O-Methyladenosine"
  misc_feature 14: /note="2'-fluoroadenosine"
  misc_feature 15: /note="2'-O-Methylguanosine"
  misc_feature 16: /note="2'- fluoro-uridine"
  misc_feature 17: /note="2'-O-Methylcytidine"
  misc_feature 18: /note="2'-fluoroadenosine"
  misc_feature 19: /note="2'-O-Methylcytidine"
  misc_feature 20: /note="DNA thymine"
  misc_feature 21: /note="DNA thymine"
uuuuauuuuaaaaagucactt

SEQ ID NO: 526 - RNA, 23 nt, Artificial Sequence
  Synthetic Construct
  misc_feature 1: /note="2'-O-Methylcytidine"
  misc_feature 2: /note="2'-O-Methylcytidine"
  misc_feature 3: /note="2'-O-Methyladenosine"
  misc_feature 4: /note="2'- fluoro-uridine"
  misc_feature 5: /note="2'-O-Methylguanosine"
  misc_feature 6: /note="2'-fluoroadenosine"
  misc_feature 7: /note="2'-O-Methylcytidine"
  misc_feature 8: /note="2'- fluoro-uridine"
  misc_feature 9: /note="2'-O-Methyluridine"
  misc_feature 10: /note="2'- fluoro-uridine"
  misc_feature 11: /note="2'-O-Methyluridine"
  misc_feature 12: /note="2'- fluoro-uridine"
  misc_feature 13: /note="2'-O-Methyladenosine"
  misc_feature 14: /note="2'-fluoroadenosine"
  misc_feature 15: /note="2'-O-Methyladenosine"
  misc_feature 16: /note="2'-fluoroadenosine"
  misc_feature 17: /note="2'-O-Methyluridine"
  misc_feature 18: /note="2'-fluoroadenosine"
  misc_feature 19: /note="2'-O-Methyladenosine"
  misc_feature 20: /note="2'-fluoroadenosine"
  misc_feature 21: /note="2'-O-Methyladenosine"
  misc_feature 22: /note="2'-fluoroadenosine"
  misc_feature 23: /note="Inverted DNA thymine"
ccaugacuuuuuaaaauaaaaat

SEQ ID NO: 527 - RNA, 21 nt, Artificial Sequence
  Synthetic Construct
  misc_feature 1: /note="2'- fluoro-uridine"
  misc_feature 2: /note="2'- fluoro-uridine"
  misc_feature 3: /note="2'-O-Methyluridine"
  misc_feature 4: /note="2'- fluoro-uridine"
  misc_feature 5: /note="2'-O-Methyluridine"
  misc_feature 6: /note="2'-fluoroadenosine"
  misc_feature 7: /note="2'-O-Methyluridine"
  misc_feature 8: /note="2'- fluoro-uridine"
  misc_feature 9: /note="2'-O-Methyluridine"
  misc_feature 10: /note="2'- fluoro-uridine"
  misc_feature 11: /note="2'-O-Methyladenosine"
  misc_feature 12: /note="2'-fluoroadenosine"
  misc_feature 13: /note="2'-O-Methyladenosine"
  misc_feature 14: /note="2'-fluoroadenosine"
  misc_feature 15: /note="2'-O-Methyladenosine"
  misc_feature 16: /note="2'-Fluoro-guanosine"
  misc_feature 17: /note="2'-O-Methyluridine"
  misc_feature 18: /note="2'-Fluoro-cytidine"
  misc_feature 19: /note="2'-O-Methyladenosine"
  misc_feature 20: /note="DNA thymine"
  misc_feature 21: /note="DNA thymine"
uuuuuauuuuaaaaagucatt

SEQ ID NO: 528 - RNA, 23 nt, Artificial Sequence
  Synthetic Construct
  misc_feature 1: /note="2'-O-Methylcytidine"
  misc_feature 2: /note="2'-O-Methylcytidine"
  misc_feature 3: /note="2'-O-Methyladenosine"
  misc_feature 4: /note="2'-Fluoro-guanosine"
  misc_feature 5: /note="2'-O-Methyladenosine"
  misc_feature 6: /note="2'-Fluoro-cytidine"
  misc_feature 7: /note="2'-O-Methyluridine"
  misc_feature 8: /note="2'- fluoro-uridine"
  misc_feature 9: /note="2'-O-Methyluridine"
  misc_feature 10: /note="2'- fluoro-uridine"
  misc_feature 11: /note="2'-O-Methyluridine"
  misc_feature 12: /note="2'-fluoroadenosine"
  misc_feature 13: /note="2'-O-Methyladenosine"
  misc_feature 14: /note="2'-fluoroadenosine"
  misc_feature 15: /note="2'-O-Methyladenosine"
  misc_feature 16: /note="2'- fluoro-uridine"
  misc_feature 17: /note="2'-O-Methyladenosine"
  misc_feature 18: /note="2'-fluoroadenosine"
  misc_feature 19: /note="2'-O-Methyladenosine"
  misc_feature 20: /note="2'-fluoroadenosine"
  misc_feature 21: /note="2'-O-Methyladenosine"
  misc_feature 22: /note="2'-Fluoro-cytidine"
  misc_feature 23: /note="Inverted DNA thymine"
ccagacuuuuuaaaauaaaaact

SEQ ID NO: 529 - RNA, 21 nt, Artificial Sequence
  Synthetic Construct
  misc_feature 1: /note="2'-Fluoro-guanosine"
  misc_feature 2: /note="2'- fluoro-uridine"
  misc_feature 3: /note="2'-O-Methyluridine"
  misc_feature 4: /note="2'- fluoro-uridine"
  misc_feature 5: /note="2'-O-Methyluridine"
  misc_feature 6: /note="2'- fluoro-uridine"
  misc_feature 7: /note="2'-O-Methyladenosine"
  misc_feature 8: /note="2'- fluoro-uridine"
  misc_feature 9: /note="2'-O-Methyluridine"
  misc_feature 10: /note="2'- fluoro-uridine"
  misc_feature 11: /note="2'-O-Methyluridine"
  misc_feature 12: /note="2'-fluoroadenosine"
  misc_feature 13: /note="2'-O-Methyladenosine"
  misc_feature 14: /note="2'-fluoroadenosine"
  misc_feature 15: /note="2'-O-Methyladenosine"
  misc_feature 16: /note="2'-fluoroadenosine"
  misc_feature 17: /note="2'-O-Methylguanosine"
  misc_feature 18: /note="2'- fluoro-uridine"
  misc_feature 19: /note="2'-O-Methylcytidine"
  misc_feature 20: /note="DNA thymine"
  misc_feature 21: /note="DNA thymine"
guuuuuauuuuaaaaaguctt

SEQ ID NO: 530 - RNA, 23 nt, Artificial Sequence
  Synthetic Construct
  misc_feature 1: /note="2'-O-Methylcytidine"
  misc_feature 2: /note="2'-O-Methylcytidine"
  misc_feature 3: /note="2'-O-Methyladenosine"
  misc_feature 4: /note="2'-fluoroadenosine"
  misc_feature 5: /note="2'-O-Methylcytidine"
  misc_feature 6: /note="2'- fluoro-uridine"
  misc_feature 7: /note="2'-O-Methyluridine"
  misc_feature 8: /note="2'- fluoro-uridine"
  misc_feature 9: /note="2'-O-Methyluridine"
  misc_feature 10: /note="2'- fluoro-uridine"
  misc_feature 11: /note="2'-O-Methyladenosine"
  misc_feature 12: /note="2'-fluoroadenosine"
  misc_feature 13: /note="2'-O-Methyladenosine"
  misc_feature 14: /note="2'-fluoroadenosine"
  misc_feature 15: /note="2'-O-Methyluridine"
  misc_feature 16: /note="2'-fluoroadenosine"
  misc_feature 17: /note="2'-O-Methyladenosine"
  misc_feature 18: /note="2'-fluoroadenosine"
  misc_feature 19: /note="2'-O-Methyladenosine"
  misc_feature 20: /note="2'-fluoroadenosine"
  misc_feature 21: /note="2'-O-Methylcytidine"
  misc_feature 22: /note="2'-fluoroadenosine"
  misc_feature 23: /note="Inverted DNA thymine"
ccaacuuuuuaaaauaaaaacat

SEQ ID NO: 531 - RNA, 21 nt, Artificial Sequence
  Synthetic Construct
  misc_feature 1: /note="2'- fluoro-uridine"
  misc_feature 2: /note="2'-Fluoro-guanosine"
  misc_feature 3: /note="2'-O-Methyluridine"
  misc_feature 4: /note="2'- fluoro-uridine"
  misc_feature 5: /note="2'-O-Methyluridine"
  misc_feature 6: /note="2'- fluoro-uridine"
  misc_feature 7: /note="2'-O-Methyluridine"
  misc_feature 8: /note="2'-fluoroadenosine"
  misc_feature 9: /note="2'-O-Methyluridine"
  misc_feature 10: /note="2'- fluoro-uridine"
  misc_feature 11: /note="2'-O-Methyluridine"
  misc_feature 12: /note="2'- fluoro-uridine"
  misc_feature 13: /note="2'-O-Methyladenosine"
  misc_feature 14: /note="2'-fluoroadenosine"
  misc_feature 15: /note="2'-O-Methyladenosine"
  misc_feature 16: /note="2'-fluoroadenosine"
  misc_feature 17: /note="2'-O-Methyladenosine"
  misc_feature 18: /note="2'-Fluoro-guanosine"
  misc_feature 19: /note="2'-O-Methyluridine"
  misc_feature 20: /note="DNA thymine"
  misc_feature 21: /note="DNA thymine"
uguuuuuauuuuaaaaagutt

SEQ ID NO: 532 - RNA, 23 nt, Artificial Sequence
  Synthetic Construct
  misc_feature 1: /note="2'-O-Methylcytidine"
  misc_feature 2: /note="2'-O-Methylcytidine"
  misc_feature 3: /note="2'-O-Methyladenosine"
  misc_feature 4: /note="2'-Fluoro-cytidine"
  misc_feature 5: /note="2'-O-Methyluridine"
  misc_feature 6: /note="2'- fluoro-uridine"
  misc_feature 7: /note="2'-O-Methyluridine"
  misc_feature 8: /note="2'- fluoro-uridine"
  misc_feature 9: /note="2'-O-Methyluridine"
  misc_feature 10: /note="2'-fluoroadenosine"
  misc_feature 11: /note="2'-O-Methyladenosine"
  misc_feature 12: /note="2'-fluoroadenosine"
  misc_feature 13: /note="2'-O-Methyladenosine"
  misc_feature 14: /note="2'- fluoro-uridine"
  misc_feature 15: /note="2'-O-Methyladenosine"
  misc_feature 16: /note="2'-fluoroadenosine"
  misc_feature 17: /note="2'-O-Methyladenosine"
  misc_feature 18: /note="2'-fluoroadenosine"
  misc_feature 19: /note="2'-O-Methyladenosine"
  misc_feature 20: /note="2'-Fluoro-cytidine"
  misc_feature 21: /note="2'-O-Methyladenosine"
  misc_feature 22: /note="2'-fluoroadenosine"
  misc_feature 23: /note="Inverted DNA thymine"
ccacuuuuuaaaauaaaaacaat

SEQ ID NO: 533 - RNA, 21 nt, Artificial Sequence
  Synthetic Construct
  misc_feature 1: /note="2'- fluoro-uridine"
  misc_feature 2: /note="2'- fluoro-uridine"
  misc_feature 3: /note="2'-O-Methylguanosine"
  misc_feature 4: /note="2'- fluoro-uridine"
  misc_feature 5: /note="2'-O-Methyluridine"
  misc_feature 6: /note="2'- fluoro-uridine"
  misc_feature 7: /note="2'-O-Methyluridine"
  misc_feature 8: /note="2'- fluoro-uridine"
  misc_feature 9: /note="2'-O-Methyladenosine"
  misc_feature 10: /note="2'- fluoro-uridine"
  misc_feature 11: /note="2'-O-Methyluridine"
  misc_feature 12: /note="2'- fluoro-uridine"
  misc_feature 13: /note="2'-O-Methyluridine"
  misc_feature 14: /note="2'-fluoroadenosine"
  misc_feature 15: /note="2'-O-Methyladenosine"
  misc_feature 16: /note="2'-fluoroadenosine"
  misc_feature 17: /note="2'-O-Methyladenosine"
  misc_feature 18: /note="2'-fluoroadenosine"
  misc_feature 19: /note="2'-O-Methylguanosine"
  misc_feature 20: /note="DNA thymine"
  misc_feature 21: /note="DNA thymine"
uuguuuuuauuuuaaaaagtt

SEQ ID NO: 534 - RNA, 23 nt, Artificial Sequence
  Synthetic Construct
  misc_feature 1: /note="2'-O-Methylcytidine"
  misc_feature 2: /note="2'-O-Methylcytidine"
  misc_feature 3: /note="2'-O-Methyladenosine"
  misc_feature 4: /note="2'- fluoro-uridine"
  misc_feature 5: /note="2'-O-Methyluridine"
  misc_feature 6: /note="2'- fluoro-uridine"
  misc_feature 7: /note="2'-O-Methyluridine"
  misc_feature 8: /note="2'- fluoro-uridine"
  misc_feature 9: /note="2'-O-Methyladenosine"
  misc_feature 10: /note="2'-fluoroadenosine"
  misc_feature 11: /note="2'-O-Methyladenosine"
  misc_feature 12: /note="2'-fluoroadenosine"
  misc_feature 13: /note="2'-O-Methyluridine"
  misc_feature 14: /note="2'-fluoroadenosine"
  misc_feature 15: /note="2'-O-Methyladenosine"
  misc_feature 16: /note="2'-fluoroadenosine"
  misc_feature 17: /note="2'-O-Methyladenosine"
  misc_feature 18: /note="2'-fluoroadenosine"
  misc_feature 19: /note="2'-O-Methylcytidine"
  misc_feature 20: /note="2'-fluoroadenosine"
  misc_feature 21: /note="2'-O-Methyladenosine"
  misc_feature 22: /note="2'-fluoroadenosine"
  misc_feature 23: /note="Inverted DNA thymine"
ccauuuuuaaaauaaaaacaaat

SEQ ID NO: 535 - RNA, 21 nt, Artificial Sequence
  Synthetic Construct
  misc_feature 1: /note="2'- fluoro-uridine"
  misc_feature 2: /note="2'- fluoro-uridine"
  misc_feature 3: /note="2'-O-Methyluridine"
  misc_feature 4: /note="2'-Fluoro-guanosine"
  misc_feature 5: /note="2'-O-Methyluridine"
  misc_feature 6: /note="2'- fluoro-uridine"
  misc_feature 7: /note="2'-O-Methyluridine"
  misc_feature 8: /note="2'- fluoro-uridine"
  misc_feature 9: /note="2'-O-Methyluridine"
  misc_feature 10: /note="2'-fluoroadenosine"
  misc_feature 11: /note="2'-O-Methyluridine"
  misc_feature 12: /note="2'- fluoro-uridine"
  misc_feature 13: /note="2'-O-Methyluridine"
  misc_feature 14: /note="2'- fluoro-uridine"
  misc_feature 15: /note="2'-O-Methyladenosine"
  misc_feature 16: /note="2'-fluoroadenosine"
  misc_feature 17: /note="2'-O-Methyladenosine"
  misc_feature 18: /note="2'-fluoroadenosine"
  misc_feature 19: /note="2'-O-Methyladenosine"
  misc_feature 20: /note="DNA thymine"
  misc_feature 21: /note="DNA thymine"
uuuguuuuuauuuuaaaaatt

SEQ ID NO: 536 - RNA, 23 nt, Artificial Sequence
  Synthetic Construct
  misc_feature 1: /note="2'-O-Methylcytidine"
  misc_feature 2: /note="2'-O-Methylcytidine"
  misc_feature 3: /note="2'-O-Methyladenosine"
  misc_feature 4: /note="2'- fluoro-uridine"
  misc_feature 5: /note="2'-O-Methyluridine"
  misc_feature 6: /note="2'- fluoro-uridine"
  misc_feature 7: /note="2'-O-Methyluridine"
  misc_feature 8: /note="2'-fluoroadenosine"
  misc_feature 9: /note="2'-O-Methyladenosine"
  misc_feature 10: /note="2'-fluoroadenosine"
  misc_feature 11: /note="2'-O-Methyladenosine"
  misc_feature 12: /note="2'- fluoro-uridine"
  misc_feature 13: /note="2'-O-Methyladenosine"
  misc_feature 14: /note="2'-fluoroadenosine"
  misc_feature 15: /note="2'-O-Methyladenosine"
  misc_feature 16: /note="2'-fluoroadenosine"
  misc_feature 17: /note="2'-O-Methyladenosine"
  misc_feature 18: /note="2'-Fluoro-cytidine"
  misc_feature 19: /note="2'-O-Methyladenosine"
  misc_feature 20: /note="2'-fluoroadenosine"
  misc_feature 21: /note="2'-O-Methyladenosine"
  misc_feature 22: /note="2'-Fluoro-cytidine"
  misc_feature 23: /note="Inverted DNA thymine"
ccauuuuaaaauaaaaacaaact

SEQ ID NO: 537 - RNA, 21 nt, Artificial Sequence
  Synthetic Construct
  misc_feature 1: /note="2'-Fluoro-guanosine"
  misc_feature 2: /note="2'- fluoro-uridine"
  misc_feature 3: /note="2'-O-Methyluridine"
  misc_feature 4: /note="2'- fluoro-uridine"
  misc_feature 5: /note="2'-O-Methylguanosine"
  misc_feature 6: /note="2'- fluoro-uridine"
  misc_feature 7: /note="2'-O-Methyluridine"
  misc_feature 8: /note="2'- fluoro-uridine"
  misc_feature 9: /note="2'-O-Methyluridine"
  misc_feature 10: /note="2'- fluoro-uridine"
  misc_feature 11: /note="2'-O-Methyladenosine"
  misc_feature 12: /note="2'- fluoro-uridine"
  misc_feature 13: /note="2'-O-Methyluridine"
  misc_feature 14: /note="2'- fluoro-uridine"
  misc_feature 15: /note="2'-O-Methyluridine"
  misc_feature 16: /note="2'-fluoroadenosine"
  misc_feature 17: /note="2'-O-Methyladenosine"
  misc_feature 18: /note="2'-fluoroadenosine"
  misc_feature 19: /note="2'-O-Methyladenosine"
  misc_feature 20: /note="DNA thymine"
  misc_feature 21: /note="DNA thymine"
guuuguuuuuauuuuaaaatt

SEQ ID NO: 538 - RNA, 23 nt, Artificial Sequence
  Synthetic Construct
  misc_feature 1: /note="2'-O-Methylcytidine"
  misc_feature 2: /note="2'-O-Methylcytidine"
  misc_feature 3: /note="2'-O-Methyladenosine"
  misc_feature 4: /note="2'- fluoro-uridine"
  misc_feature 5: /note="2'-O-Methyluridine"
  misc_feature 6: /note="2'- fluoro-uridine"
  misc_feature 7: /note="2'-O-Methyladenosine"
  misc_feature 8: /note="2'-fluoroadenosine"
  misc_feature 9: /note="2'-O-Methyladenosine"
  misc_feature 10: /note="2'-fluoroadenosine"
  misc_feature 11: /note="2'-O-Methyluridine"
  misc_feature 12: /note="2'-fluoroadenosine"
  misc_feature 13: /note="2'-O-Methyladenosine"
  misc_feature 14: /note="2'-fluoroadenosine"
  misc_feature 15: /note="2'-O-Methyladenosine"
  misc_feature 16: /note="2'-fluoroadenosine"
  misc_feature 17: /note="2'-O-Methylcytidine"
  misc_feature 18: /note="2'-fluoroadenosine"
  misc_feature 19: /note="2'-O-Methyladenosine"
  misc_feature 20: /note="2'-fluoroadenosine"
  misc_feature 21: /note="2'-O-Methylcytidine"
  misc_feature 22: /note="2'-fluoroadenosine"
  misc_feature 23: /note="Inverted DNA thymine"
ccauuuaaaauaaaaacaaacat

SEQ ID NO: 539 - RNA, 21 nt, Artificial Sequence
  Synthetic Construct
  misc_feature 1: /note="2'- fluoro-uridine"
  misc_feature 2: /note="2'-Fluoro-guanosine"
  misc_feature 3: /note="2'-O-Methyluridine"
  misc_feature 4: /note="2'- fluoro-uridine"
  misc_feature 5: /note="2'-O-Methyluridine"
  misc_feature 6: /note="2'-Fluoro-guanosine"
  misc_feature 7: /note="2'-O-Methyluridine"
  misc_feature 8: /note="2'- fluoro-uridine"
  misc_feature 9: /note="2'-O-Methyluridine"
  misc_feature 10: /note="2'- fluoro-uridine"
  misc_feature 11: /note="2'-O-Methyluridine"
  misc_feature 12: /note="2'-fluoroadenosine"
  misc_feature 13: /note="2'-O-Methyluridine"
  misc_feature 14: /note="2'- fluoro-uridine"
  misc_feature 15: /note="2'-O-Methyluridine"
  misc_feature 16: /note="2'- fluoro-uridine"
  misc_feature 17: /note="2'-O-Methyladenosine"
  misc_feature 18: /note="2'-fluoroadenosine"
  misc_feature 19: /note="2'-O-Methyladenosine"
  misc_feature 20: /note="DNA thymine"
  misc_feature 21: /note="DNA thymine"
uguuuguuuuuauuuuaaatt

SEQ ID NO: 540 - RNA, 23 nt, Artificial Sequence
  Synthetic Construct
  misc_feature 1: /note="2'-O-Methylcytidine"
  misc_feature 2: /note="2'-O-Methylcytidine"
  misc_feature 3: /note="2'-O-Methyladenosine"
  misc_feature 4: /note="2'-Fluoro-cytidine"
  misc_feature 5: /note="2'-O-Methyladenosine"
  misc_feature 6: /note="2'- fluoro-uridine"
  misc_feature 7: /note="2'-O-Methyluridine"
  misc_feature 8: /note="2'- fluoro-uridine"
  misc_feature 9: /note="2'-O-Methyluridine"
  misc_feature 10: /note="2'- fluoro-uridine"
  misc_feature 11: /note="2'-O-Methyladenosine"
  misc_feature 12: /note="2'- fluoro-uridine"
  misc_feature 13: /note="2'-O-Methyluridine"
  misc_feature 14: /note="2'-fluoroadenosine"
  misc_feature 15: /note="2'-O-Methyladenosine"
  misc_feature 16: /note="2'- fluoro-uridine"
  misc_feature 17: /note="2'-O-Methyladenosine"
  misc_feature 18: /note="2'- fluoro-uridine"
  misc_feature 19: /note="2'-O-Methylguanosine"
  misc_feature 20: /note="2'-Fluoro-guanosine"
  misc_feature 21: /note="2'-O-Methyluridine"
  misc_feature 22: /note="2'-Fluoro-guanosine"
  misc_feature 23: /note="Inverted DNA thymine"
ccacauuuuuauuaauauggugt

SEQ ID NO: 541 - RNA, 21 nt, Artificial Sequence
  Synthetic Construct
  misc_feature 1: /note="2'-Fluoro-cytidine"
  misc_feature 2: /note="2'-fluoroadenosine"
  misc_feature 3: /note="2'-O-Methylcytidine"
  misc_feature 4: /note="2'-Fluoro-cytidine"
  misc_feature 5: /note="2'-O-Methyladenosine"
  misc_feature 6: /note="2'- fluoro-uridine"
  misc_feature 7: /note="2'-O-Methyladenosine"
  misc_feature 8: /note="2'- fluoro-uridine"
  misc_feature 9: /note="2'-O-Methyluridine"
  misc_feature 10: /note="2'-fluoroadenosine"
  misc_feature 11: /note="2'-O-Methyladenosine"
  misc_feature 12: /note="2'- fluoro-uridine"
  misc_feature 13: /note="2'-O-Methyladenosine"
  misc_feature 14: /note="2'-fluoroadenosine"
  misc_feature 15: /note="2'-O-Methyladenosine"
  misc_feature 16: /note="2'-fluoroadenosine"
  misc_feature 17: /note="2'-O-Methyladenosine"
  misc_feature 18: /note="2'- fluoro-uridine"
  misc_feature 19: /note="2'-O-Methylguanosine"
  misc_feature 20: /note="DNA thymine"
  misc_feature 21: /note="DNA thymine"
caccauauuaauaaaaaugtt

SEQ ID NO: 542 - RNA, 23 nt, Artificial Sequence
  Synthetic Construct
  misc_feature 1: /note="2'-O-Methylcytidine"
  misc_feature 2: /note="2'-O-Methylcytidine"
  misc_feature 3: /note="2'-O-Methyladenosine"
  misc_feature 4: /note="2'-fluoroadenosine"
  misc_feature 5: /note="2'-O-Methyluridine"
  misc_feature 6: /note="2'- fluoro-uridine"
  misc_feature 7: /note="2'-O-Methyluridine"
  misc_feature 8: /note="2'- fluoro-uridine"
  misc_feature 9: /note="2'-O-Methyluridine"
  misc_feature 10: /note="2'-fluoroadenosine"
  misc_feature 11: /note="2'-O-Methyluridine"
  misc_feature 12: /note="2'- fluoro-uridine"
  misc_feature 13: /note="2'-O-Methyladenosine"
  misc_feature 14: /note="2'-fluoroadenosine"
  misc_feature 15: /note="2'-O-Methyluridine"
  misc_feature 16: /note="2'-fluoroadenosine"
  misc_feature 17: /note="2'-O-Methyluridine"
  misc_feature 18: /note="2'-Fluoro-guanosine"
  misc_feature 19: /note="2'-O-Methylguanosine"
  misc_feature 20: /note="2'- fluoro-uridine"
  misc_feature 21: /note="2'-O-Methylguanosine"
  misc_feature 22: /note="2'-fluoroadenosine"
  misc_feature 23: /note="Inverted DNA thymine"
ccaauuuuuauuaauauggugat

SEQ ID NO: 543 - RNA, 21 nt, Artificial Sequence
  Synthetic Construct
  misc_feature 1: /note="2'- fluoro-uridine"
  misc_feature 2: /note="2'-Fluoro-cytidine"
  misc_feature 3: /note="2'-O-Methyladenosine"
  misc_feature 4: /note="2'-Fluoro-cytidine"
  misc_feature 5: /note="2'-O-Methylcytidine"
  misc_feature 6: /note="2'-fluoroadenosine"
  misc_feature 7: /note="2'-O-Methyluridine"
  misc_feature 8: /note="2'-fluoroadenosine"
  misc_feature 9: /note="2'-O-Methyluridine"
  misc_feature 10: /note="2'- fluoro-uridine"
  misc_feature 11: /note="2'-O-Methyladenosine"
  misc_feature 12: /note="2'-fluoroadenosine"
  misc_feature 13: /note="2'-O-Methyluridine"
  misc_feature 14: /note="2'-fluoroadenosine"
  misc_feature 15: /note="2'-O-Methyladenosine"
  misc_feature 16: /note="2'-fluoroadenosine"
  misc_feature 17: /note="2'-O-Methyladenosine"
  misc_feature 18: /note="2'-fluoroadenosine"
  misc_feature 19: /note="2'-O-Methyluridine"
  misc_feature 20: /note="DNA thymine"
  misc_feature 21: /note="DNA thymine"
ucaccauauuaauaaaaautt

SEQ ID NO: 544 - RNA, 23 nt, Artificial Sequence
  Synthetic Construct
  misc_feature 1: /note="2'-O-Methylcytidine"
  misc_feature 2: /note="2'-O-Methylcytidine"
  misc_feature 3: /note="2'-O-Methyladenosine"
  misc_feature 4: /note="2'- fluoro-uridine"
  misc_feature 5: /note="2'-O-Methyluridine"
  misc_feature 6: /note="2'- fluoro-uridine"
  misc_feature 7: /note="2'-O-Methyluridine"
  misc_feature 8: /note="2'- fluoro-uridine"
  misc_feature 9: /note="2'-O-Methyladenosine"
  misc_feature 10: /note="2'- fluoro-uridine"
  misc_feature 11: /note="2'-O-Methyluridine"
  misc_feature 12: /note="2'-fluoroadenosine"
  misc_feature 13: /note="2'-O-Methyladenosine"
  misc_feature 14: /note="2'- fluoro-uridine"
  misc_feature 15: /note="2'-O-Methyladenosine"
  misc_feature 16: /note="2'- fluoro-uridine"
  misc_feature 17: /note="2'-O-Methylguanosine"
  misc_feature 18: /note="2'-Fluoro-guanosine"
  misc_feature 19: /note="2'-O-Methyluridine"
  misc_feature 20: /note="2'-Fluoro-guanosine"
  misc_feature 21: /note="2'-O-Methyladenosine"
  misc_feature 22: /note="2'-Fluoro-cytidine"
  misc_feature 23: /note="Inverted DNA thymine"
ccauuuuuauuaauauggugact

SEQ ID NO: 545 - RNA, 21 nt, Artificial Sequence
  Synthetic Construct
  misc_feature 1: /note="2'-Fluoro-guanosine"
  misc_feature 2: /note="2'- fluoro-uridine"
  misc_feature 3: /note="2'-O-Methylcytidine"
  misc_feature 4: /note="2'-fluoroadenosine"
  misc_feature 5: /note="2'-O-Methylcytidine"
  misc_feature 6: /note="2'-Fluoro-cytidine"
  misc_feature 7: /note="2'-O-Methyladenosine"
  misc_feature 8: /note="2'- fluoro-uridine"
  misc_feature 9: /note="2'-O-Methyladenosine"
  misc_feature 10: /note="2'- fluoro-uridine"
  misc_feature 11: /note="2'-O-Methyluridine"
  misc_feature 12: /note="2'-fluoroadenosine"
  misc_feature 13: /note="2'-O-Methyladenosine"
  misc_feature 14: /note="2'- fluoro-uridine"
  misc_feature 15: /note="2'-O-Methyladenosine"
  misc_feature 16: /note="2'-fluoroadenosine"
  misc_feature 17: /note="2'-O-Methyladenosine"
  misc_feature 18: /note="2'-fluoroadenosine"
  misc_feature 19: /note="2'-O-Methyladenosine"
  misc_feature 20: /note="DNA thymine"
  misc_feature 21: /note="DNA thymine"
gucaccauauuaauaaaaatt

SEQ ID NO: 546 - RNA, 23 nt, Artificial Sequence
  Synthetic Construct
  misc_feature 1: /note="2'-O-Methylcytidine"
  misc_feature 2: /note="2'-O-Methylcytidine"
  misc_feature 3: /note="2'-O-Methyladenosine"
  misc_feature 4: /note="2'- fluoro-uridine"
  misc_feature 5: /note="2'-O-Methyluridine"
  misc_feature 6: /note="2'- fluoro-uridine"
  misc_feature 7: /note="2'-O-Methyluridine"
  misc_feature 8: /note="2'-fluoroadenosine"
  misc_feature 9: /note="2'-O-Methyluridine"
  misc_feature 10: /note="2'- fluoro-uridine"
  misc_feature 11: /note="2'-O-Methyladenosine"
  misc_feature 12: /note="2'-fluoroadenosine"
  misc_feature 13: /note="2'-O-Methyluridine"
  misc_feature 14: /note="2'-fluoroadenosine"
  misc_feature 15: /note="2'-O-Methyluridine"
  misc_feature 16: /note="2'-Fluoro-guanosine"
  misc_feature 17: /note="2'-O-Methylguanosine"
  misc_feature 18: /note="2'- fluoro-uridine"
  misc_feature 19: /note="2'-O-Methylguanosine"
  misc_feature 20: /note="2'-fluoroadenosine"
  misc_feature 21: /note="2'-O-Methylcytidine"
  misc_feature 22: /note="2'- fluoro-uridine"
  misc_feature 23: /note="Inverted DNA thymine"
ccauuuuauuaauauggugacut

SEQ ID NO: 547 - RNA, 21 nt, Artificial Sequence
  Synthetic Construct
  misc_feature 1: /note="2'-fluoroadenosine"
  misc_feature 2: /note="2'-Fluoro-guanosine"
  misc_feature 3: /note="2'-O-Methyluridine"
  misc_feature 4: /note="2'-Fluoro-cytidine"
  misc_feature 5: /note="2'-O-Methyladenosine"
  misc_feature 6: /note="2'-Fluoro-cytidine"
  misc_feature 7: /note="2'-O-Methylcytidine"
  misc_feature 8: /note="2'-fluoroadenosine"
  misc_feature 9: /note="2'-O-Methyluridine"
  misc_feature 10: /note="2'-fluoroadenosine"
  misc_feature 11: /note="2'-O-Methyluridine"
  misc_feature 12: /note="2'- fluoro-uridine"
  misc_feature 13: /note="2'-O-Methyladenosine"
  misc_feature 14: /note="2'-fluoroadenosine"
  misc_feature 15: /note="2'-O-Methyluridine"
  misc_feature 16: /note="2'-fluoroadenosine"
  misc_feature 17: /note="2'-O-Methyladenosine"
  misc_feature 18: /note="2'-fluoroadenosine"
  misc_feature 19: /note="2'-O-Methyladenosine"
  misc_feature 20: /note="DNA thymine"
  misc_feature 21: /note="DNA thymine"
agucaccauauuaauaaaatt

SEQ ID NO: 548 - RNA, 23 nt, Artificial Sequence
  Synthetic Construct
  misc_feature 1: /note="2'-O-Methylcytidine"
  misc_feature 2: /note="2'-O-Methylcytidine"
  misc_feature 3: /note="2'-O-Methyladenosine"
  misc_feature 4: /note="2'- fluoro-uridine"
  misc_feature 5: /note="2'-O-Methyluridine"
  misc_feature 6: /note="2'- fluoro-uridine"
  misc_feature 7: /note="2'-O-Methyladenosine"
  misc_feature 8: /note="2'- fluoro-uridine"
  misc_feature 9: /note="2'-O-Methyluridine"
  misc_feature 10: /note="2'-fluoroadenosine"
  misc_feature 11: /note="2'-O-Methyladenosine"
  misc_feature 12: /note="2'- fluoro-uridine"
  misc_feature 13: /note="2'-O-Methyladenosine"
  misc_feature 14: /note="2'- fluoro-uridine"
  misc_feature 15: /note="2'-O-Methylguanosine"
  misc_feature 16: /note="2'-Fluoro-guanosine"
  misc_feature 17: /note="2'-O-Methyluridine"
  misc_feature 18: /note="2'-Fluoro-guanosine"
  misc_feature 19: /note="2'-O-Methyladenosine"
  misc_feature 20: /note="2'-Fluoro-cytidine"
  misc_feature 21: /note="2'-O-Methyluridine"
  misc_feature 22: /note="2'- fluoro-uridine"
  misc_feature 23: /note="Inverted DNA thymine"
ccauuuauuaauauggugacuut

SEQ ID NO: 549 - RNA, 21 nt, Artificial Sequence
  Synthetic Construct
  misc_feature 1: /note="2'-fluoroadenosine"
  misc_feature 2: /note="2'-fluoroadenosine"
  misc_feature 3: /note="2'-O-Methylguanosine"
  misc_feature 4: /note="2'- fluoro-uridine"
  misc_feature 5: /note="2'-O-Methylcytidine"
  misc_feature 6: /note="2'-fluoroadenosine"
  misc_feature 7: /note="2'-O-Methylcytidine"
  misc_feature 8: /note="2'-Fluoro-cytidine"
  misc_feature 9: /note="2'-O-Methyladenosine"
  misc_feature 10: /note="2'- fluoro-uridine"
  misc_feature 11: /note="2'-O-Methyladenosine"
  misc_feature 12: /note="2'- fluoro-uridine"
  misc_feature 13: /note="2'-O-Methyluridine"
  misc_feature 14: /note="2'-fluoroadenosine"
  misc_feature 15: /note="2'-O-Methyladenosine"
  misc_feature 16: /note="2'- fluoro-uridine"
  misc_feature 17: /note="2'-O-Methyladenosine"
  misc_feature 18: /note="2'-fluoroadenosine"
  misc_feature 19: /note="2'-O-Methyladenosine"
  misc_feature 20: /note="DNA thymine"
  misc_feature 21: /note="DNA thymine"
aagucaccauauuaauaaatt

SEQ ID NO: 550 - RNA, 23 nt, Artificial Sequence
  Synthetic Construct
  misc_feature 1: /note="2'-O-Methylcytidine"
  misc_feature 2: /note="2'-O-Methylcytidine"
  misc_feature 3: /note="2'-O-Methyladenosine"
  misc_feature 4: /note="2'-fluoroadenosine"
  misc_feature 5: /note="2'-O-Methyladenosine"
  misc_feature 6: /note="2'- fluoro-uridine"
  misc_feature 7: /note="2'-O-Methyladenosine"
  misc_feature 8: /note="2'- fluoro-uridine"
  misc_feature 9: /note="2'-Fluoro-guanosine"
  misc_feature 10: /note="2'-Fluoro-guanosine"
  misc_feature 11: /note="2'-O-Methyluridine"
  misc_feature 12: /note="2'-Fluoro-guanosine"
  misc_feature 13: /note="2'-O-Methyladenosine"
  misc_feature 14: /note="2'-Fluoro-cytidine"
  misc_feature 15: /note="2'-O-Methyluridine"
  misc_feature 16: /note="2'- fluoro-uridine"
  misc_feature 17: /note="2'-O-Methyluridine"
  misc_feature 18: /note="2'- fluoro-uridine"
  misc_feature 19: /note="2'-O-Methyluridine"
  misc_feature 20: /note="2'-fluoroadenosine"
  misc_feature 21: /note="2'-O-Methyladenosine"
  misc_feature 22: /note="2'-fluoroadenosine"
  misc_feature 23: /note="Inverted DNA thymine"
ccaaauauggugacuuuuuaaat

SEQ ID NO: 551 - RNA, 21 nt, Artificial Sequence
  Synthetic Construct
  misc_feature 1: /note="2'- fluoro-uridine"
  misc_feature 2: /note="2'- fluoro-uridine"
  misc_feature 3: /note="2'-O-Methyluridine"
  misc_feature 4: /note="2'-fluoroadenosine"
  misc_feature 5: /note="2'-O-Methyladenosine"
  misc_feature 6: /note="2'-fluoroadenosine"
  misc_feature 7: /note="2'-O-Methyladenosine"
  misc_feature 8: /note="2'-fluoroadenosine"
  misc_feature 9: /note="2'-Fluoro-guanosine"
  misc_feature 10: /note="2'- fluoro-uridine"
  misc_feature 11: /note="2'-O-Methylcytidine"
  misc_feature 12: /note="2'-fluoroadenosine"
  misc_feature 13: /note="2'-O-Methylcytidine"
  misc_feature 14: /note="2'-Fluoro-cytidine"
  misc_feature 15: /note="2'-O-Methyladenosine"
  misc_feature 16: /note="2'- fluoro-uridine"
  misc_feature 17: /note="2'-O-Methyladenosine"
  misc_feature 18: /note="2'- fluoro-uridine"
  misc_feature 19: /note="2'-O-Methyluridine"
  misc_feature 20: /note="DNA thymine"
  misc_feature 21: /note="DNA thymine"
uuuaaaaagucaccauauutt

SEQ ID NO: 552 - RNA, 25 nt, Artificial Sequence
  Synthetic Construct
  misc_feature 1: /note="2'-O-Methylcytidine"
  misc_feature 2: /note="2'-O-Methylcytidine"
  misc_feature 3: /note="2'-O-Methyladenosine"
  misc_feature 4: /note="2'-Fluoro-guanosine"
  misc_feature 5: /note="2'-O-Methylcytidine"
  misc_feature 6: /note="2'-fluoroadenosine"
  misc_feature 7: /note="2'-O-Methyluridine"
  misc_feature 8: /note="2'- fluoro-uridine"
  misc_feature 9: /note="2'-O-Methyluridine"
  misc_feature 10: /note="2'- fluoro-uridine"
  misc_feature 11: /note="2'-O-Methyluridine"
  misc_feature 12: /note="2'-fluoroadenosine"
  misc_feature 13: /note="2'-O-Methyluridine"
  misc_feature 14: /note="2'- fluoro-uridine"
  misc_feature 15: /note="2'-O-Methyladenosine"
  misc_feature 16: /note="2'-fluoroadenosine"
  misc_feature 17: /note="2'-O-Methyluridine"
  misc_feature 18: /note="2'-fluoroadenosine"
  misc_feature 19: /note="2'-O-Methyluridine"
  misc_feature 20: /note="2'-Fluoro-guanosine"
  misc_feature 21: /note="2'-Fluoro-guanosine"
  misc_feature 22: /note="2'- fluoro-uridine"
  misc_feature 23: /note="2'-Fluoro-guanosine"
  misc_feature 25: /note="Inverted DNA thymine"
ccagcauuuuuauuaauauggugat

SEQ ID NO: 553 - RNA, 23 nt, Artificial Sequence
  Synthetic Construct
  misc_feature 1: /note="2'- fluoro-uridine"
  misc_feature 2: /note="2'-Fluoro-cytidine"
  misc_feature 3: /note="2'-O-Methyladenosine"
  misc_feature 4: /note="2'-Fluoro-cytidine"
  misc_feature 5: /note="2'-O-Methylcytidine"
  misc_feature 6: /note="2'-fluoroadenosine"
  misc_feature 7: /note="2'-O-Methyluridine"
  misc_feature 8: /note="2'-fluoroadenosine"
  misc_feature 9: /note="2'-O-Methyluridine"
  misc_feature 10: /note="2'- fluoro-uridine"
  misc_feature 11: /note="2'-O-Methyladenosine"
  misc_feature 12: /note="2'-fluoroadenosine"
  misc_feature 13: /note="2'-O-Methyluridine"
  misc_feature 14: /note="2'-fluoroadenosine"
  misc_feature 15: /note="2'-O-Methyladenosine"
  misc_feature 16: /note="2'-fluoroadenosine"
  misc_feature 17: /note="2'-O-Methyladenosine"
  misc_feature 18: /note="2'-fluoroadenosine"
  misc_feature 19: /note="2'-O-Methyluridine"
  misc_feature 20: /note="2'-Fluoro-guanosine"
  misc_feature 21: /note="2'-O-Methylcytidine"
  misc_feature 22: /note="DNA thymine"
  misc_feature 23: /note="DNA thymine"
ucaccauauuaauaaaaaugctt

SEQ ID NO: 554 - RNA, 25 nt, Artificial Sequence
  Synthetic Construct
  misc_feature 1: /note="2'-O-Methylcytidine"
  misc_feature 2: /note="2'-O-Methylcytidine"
  misc_feature 3: /note="2'-O-Methyladenosine"
  misc_feature 4: /note="2'-Fluoro-cytidine"
  misc_feature 5: /note="2'-O-Methyladenosine"
  misc_feature 6: /note="2'- fluoro-uridine"
  misc_feature 7: /note="2'-O-Methyluridine"
  misc_feature 8: /note="2'- fluoro-uridine"
  misc_feature 9: /note="2'-O-Methyluridine"
  misc_feature 10: /note="2'- fluoro-uridine"
  misc_feature 11: /note="2'-O-Methyladenosine"
  misc_feature 12: /note="2'- fluoro-uridine"
  misc_feature 13: /note="2'-O-Methyluridine"
  misc_feature 14: /note="2'-fluoroadenosine"
  misc_feature 15: /note="2'-O-Methyladenosine"
  misc_feature 16: /note="2'- fluoro-uridine"
  misc_feature 17: /note="2'-O-Methyladenosine"
  misc_feature 18: /note="2'- fluoro-uridine"
  misc_feature 19: /note="2'-Fluoro-guanosine"
  misc_feature 20: /note="2'-Fluoro-guanosine"
  misc_feature 21: /note="2'-O-Methyluridine"
  misc_feature 22: /note="2'-Fluoro-guanosine"
  misc_feature 23: /note="2'-O-Methyladenosine"
  misc_feature 24: /note="2'-Fluoro-cytidine"
  misc_feature 25: /note="Inverted DNA thymine"
ccacauuuuuauuaauauggugact

SEQ ID NO: 555 - RNA, 23 nt, Artificial Sequence
  Synthetic Construct
  misc_feature 1: /note="2'-Fluoro-guanosine"
  misc_feature 2: /note="2'- fluoro-uridine"
  misc_feature 3: /note="2'-O-Methylcytidine"
  misc_feature 4: /note="2'-fluoroadenosine"
  misc_feature 5: /note="2'-O-Methylcytidine"
  misc_feature 6: /note="2'-Fluoro-cytidine"
  misc_feature 7: /note="2'-O-Methyladenosine"
  misc_feature 8: /note="2'- fluoro-uridine"
  misc_feature 9: /note="2'-O-Methyladenosine"
  misc_feature 10: /note="2'- fluoro-uridine"
  misc_feature 11: /note="2'-O-Methyluridine"
  misc_feature 12: /note="2'-fluoroadenosine"
  misc_feature 13: /note="2'-O-Methyladenosine"
  misc_feature 14: /note="2'- fluoro-uridine"
  misc_feature 15: /note="2'-O-Methyladenosine"
  misc_feature 16: /note="2'-fluoroadenosine"
  misc_feature 17: /note="2'-O-Methyladenosine"
  misc_feature 18: /note="2'-fluoroadenosine"
  misc_feature 19: /note="2'-O-Methyladenosine"
  misc_feature 20: /note="2'- fluoro-uridine"
  misc_feature 21: /note="2'-O-Methylguanosine"
  misc_feature 22: /note="DNA thymine"
  misc_feature 23: /note="DNA thymine"
gucaccauauuaauaaaaaugtt

SEQ ID NO: 556 - RNA, 25 nt, Artificial Sequence
  Synthetic Construct
  misc_feature 1: /note="2'-O-Methylcytidine"
  misc_feature 2: /note="2'-O-Methylcytidine"
  misc_feature 3: /note="2'-O-Methyladenosine"
  misc_feature 4: /note="2'- fluoro-uridine"
  misc_feature 5: /note="2'-O-Methyluridine"
  misc_feature 6: /note="2'- fluoro-uridine"
  misc_feature 7: /note="2'-O-Methyluridine"
  misc_feature 8: /note="2'- fluoro-uridine"
  misc_feature 9: /note="2'-O-Methyladenosine"
  misc_feature 10: /note="2'- fluoro-uridine"
  misc_feature 11: /note="2'-O-Methyluridine"
  misc_feature 12: /note="2'-fluoroadenosine"
  misc_feature 13: /note="2'-O-Methyladenosine"
  misc_feature 14: /note="2'- fluoro-uridine"
  misc_feature 15: /note="2'-O-Methyladenosine"
  misc_feature 16: /note="2'- fluoro-uridine"
  misc_feature 17: /note="2'-Fluoro-guanosine"
  misc_feature 18: /note="2'-Fluoro-guanosine"
  misc_feature 19: /note="2'-O-Methyluridine"
  misc_feature 20: /note="2'-Fluoro-guanosine"
  misc_feature 21: /note="2'-O-Methyladenosine"
  misc_feature 22: /note="2'-Fluoro-cytidine"
  misc_feature 23: /note="2'-O-Methyluridine"
  misc_feature 24: /note="2'- fluoro-uridine"
  misc_feature 25: /note="Inverted DNA thymine"
ccauuuuuauuaauauggugacuut

SEQ ID NO: 557 - RNA, 23 nt, Artificial Sequence
  Synthetic Construct
  misc_feature 1: /note="2'-fluoroadenosine"
  misc_feature 2: /note="2'-fluoroadenosine"
  misc_feature 3: /note="2'-O-Methylguanosine"
  misc_feature 4: /note="2'- fluoro-uridine"
  misc_feature 5: /note="2'-O-Methylcytidine"
  misc_feature 6: /note="2'-fluoroadenosine"
  misc_feature 7: /note="2'-O-Methylcytidine"
  misc_feature 8: /note="2'-Fluoro-cytidine"
  misc_feature 9: /note="2'-O-Methyladenosine"
  misc_feature 10: /note="2'- fluoro-uridine"
  misc_feature 11: /note="2'-O-Methyladenosine"
  misc_feature 12: /note="2'- fluoro-uridine"
  misc_feature 13: /note="2'-O-Methyluridine"
  misc_feature 14: /note="2'-fluoroadenosine"
  misc_feature 15: /note="2'-O-Methyladenosine"
  misc_feature 16: /note="2'- fluoro-uridine"
  misc_feature 17: /note="2'-O-Methyladenosine"
  misc_feature 18: /note="2'-fluoroadenosine"
  misc_feature 19: /note="2'-O-Methyladenosine"
  misc_feature 20: /note="2'-fluoroadenosine"
  misc_feature 21: /note="2'-O-Methyladenosine"
  misc_feature 22: /note="DNA thymine"
  misc_feature 23: /note="DNA thymine"
aagucaccauauuaauaaaaatt

SEQ ID NO: 558 - RNA, 25 nt, Artificial Sequence
  Synthetic Construct
  misc_feature 1: /note="2'-O-Methylcytidine"
  misc_feature 2: /note="2'-O-Methylcytidine"
  misc_feature 3: /note="2'-O-Methyladenosine"
  misc_feature 4: /note="2'- fluoro-uridine"
  misc_feature 5: /note="2'-O-Methyluridine"
  misc_feature 6: /note="2'-fluoroadenosine"
  misc_feature 7: /note="2'-O-Methyluridine"
  misc_feature 8: /note="2'- fluoro-uridine"
  misc_feature 9: /note="2'-O-Methyladenosine"
  misc_feature 10: /note="2'-fluoroadenosine"
  misc_feature 11: /note="2'-O-Methyluridine"
  misc_feature 12: /note="2'-fluoroadenosine"
  misc_feature 13: /note="2'-O-Methyluridine"
  misc_feature 14: /note="2'-Fluoro-guanosine"
  misc_feature 15: /note="2'-Fluoro-guanosine"
  misc_feature 16: /note="2'- fluoro-uridine"
  misc_feature 17: /note="2'-Fluoro-guanosine"
  misc_feature 18: /note="2'-fluoroadenosine"
  misc_feature 19: /note="2'-O-Methylcytidine"
  misc_feature 20: /note="2'- fluoro-uridine"
  misc_feature 21: /note="2'-O-Methyluridine"
  misc_feature 22: /note="2'- fluoro-uridine"
  misc_feature 23: /note="2'-O-Methyluridine"
  misc_feature 24: /note="2'- fluoro-uridine"
  misc_feature 25: /note="Inverted DNA thymine"
ccauuauuaauauggugacuuuuut

SEQ ID NO: 559 - RNA, 23 nt, Artificial Sequence
  Synthetic Construct
  misc_feature 1: /note="2'-fluoroadenosine"
  misc_feature 2: /note="2'-fluoroadenosine"
  misc_feature 3: /note="2'-O-Methyladenosine"
  misc_feature 4: /note="2'-fluoroadenosine"
  misc_feature 5: /note="2'-O-Methyladenosine"
  misc_feature 6: /note="2'-Fluoro-guanosine"
  misc_feature 7: /note="2'-O-Methyluridine"
  misc_feature 8: /note="2'-Fluoro-cytidine"
  misc_feature 9: /note="2'-O-Methyladenosine"
  misc_feature 10: /note="2'-Fluoro-cytidine"
  misc_feature 11: /note="2'-O-Methylcytidine"
  misc_feature 12: /note="2'-fluoroadenosine"
  misc_feature 13: /note="2'-O-Methyluridine"
  misc_feature 14: /note="2'-fluoroadenosine"
  misc_feature 15: /note="2'-O-Methyluridine"
  misc_feature 16: /note="2'- fluoro-uridine"
  misc_feature 17: /note="2'-O-Methyladenosine"
  misc_feature 18: /note="2'-fluoroadenosine"
  misc_feature 19: /note="2'-O-Methyluridine"
  misc_feature 20: /note="2'-fluoroadenosine"
  misc_feature 21: /note="2'-O-Methyladenosine"
  misc_feature 22: /note="DNA thymine"
  misc_feature 23: /note="DNA thymine"
aaaaagucaccauauuaauaatt

SEQ ID NO: 560 - RNA, 25 nt, Artificial Sequence
  Synthetic Construct
  misc_feature 1: /note="2'-O-Methylcytidine"
  misc_feature 2: /note="2'-O-Methylcytidine"
  misc_feature 3: /note="2'-O-Methyladenosine"
  misc_feature 4: /note="2'-fluoroadenosine"
  misc_feature 5: /note="2'-O-Methyluridine"
  misc_feature 6: /note="2'- fluoro-uridine"
  misc_feature 7: /note="2'-O-Methyladenosine"
  misc_feature 8: /note="2'-fluoroadenosine"
  misc_feature 9: /note="2'-O-Methyluridine"
  misc_feature 10: /note="2'-fluoroadenosine"
  misc_feature 11: /note="2'-O-Methyluridine"
  misc_feature 12: /note="2'-Fluoro-guanosine"
  misc_feature 13: /note="2'-Fluoro-guanosine"
  misc_feature 14: /note="2'- fluoro-uridine"
  misc_feature 15: /note="2'-Fluoro-guanosine"
  misc_feature 16: /note="2'-fluoroadenosine"
  misc_feature 17: /note="2'-O-Methylcytidine"
  misc_feature 18: /note="2'- fluoro-uridine"
  misc_feature 19: /note="2'-O-Methyluridine"
  misc_feature 20: /note="2'- fluoro-uridine"
  misc_feature 21: /note="2'-O-Methyluridine"
  misc_feature 22: /note="2'- fluoro-uridine"
  misc_feature 23: /note="2'-O-Methyladenosine"
  misc_feature 24: /note="2'-fluoroadenosine"
  misc_feature 25: /note="Inverted DNA thymine"
ccaauuaauauggugacuuuuuaat

SEQ ID NO: 561 - RNA, 23 nt, Artificial Sequence
  Synthetic Construct
  misc_feature 1: /note="2'- fluoro-uridine"
  misc_feature 2: /note="2'- fluoro-uridine"
  misc_feature 3: /note="2'-O-Methyladenosine"
  misc_feature 4: /note="2'-fluoroadenosine"
  misc_feature 5: /note="2'-O-Methyladenosine"
  misc_feature 6: /note="2'-fluoroadenosine"
  misc_feature 7: /note="2'-O-Methyladenosine"
  misc_feature 8: /note="2'-Fluoro-guanosine"
  misc_feature 9: /note="2'-O-Methyluridine"
  misc_feature 10: /note="2'-Fluoro-cytidine"
  misc_feature 11: /note="2'-O-Methyladenosine"
  misc_feature 12: /note="2'-Fluoro-cytidine"
  misc_feature 13: /note="2'-O-Methylcytidine"
  misc_feature 14: /note="2'-fluoroadenosine"
  misc_feature 15: /note="2'-O-Methyluridine"
  misc_feature 16: /note="2'-fluoroadenosine"
  misc_feature 17: /note="2'-O-Methyluridine"
  misc_feature 18: /note="2'- fluoro-uridine"
  misc_feature 19: /note="2'-O-Methyladenosine"
  misc_feature 20: /note="2'-fluoroadenosine"
  misc_feature 21: /note="2'-O-Methyluridine"
  misc_feature 22: /note="DNA thymine"
  misc_feature 23: /note="DNA thymine"
uuaaaaagucaccauauuaautt

SEQ ID NO: 562 - RNA, 25 nt, Artificial Sequence
  Synthetic Construct
  misc_feature 1: /note="2'-O-Methylcytidine"
  misc_feature 2: /note="2'-O-Methylcytidine"
  misc_feature 3: /note="2'-O-Methyladenosine"
  misc_feature 4: /note="2'- fluoro-uridine"
  misc_feature 5: /note="2'-O-Methyluridine"
  misc_feature 6: /note="2'-fluoroadenosine"
  misc_feature 7: /note="2'-O-Methyladenosine"
  misc_feature 8: /note="2'- fluoro-uridine"
  misc_feature 9: /note="2'-O-Methyladenosine"
  misc_feature 10: /note="2'- fluoro-uridine"
  misc_feature 11: /note="2'-Fluoro-guanosine"
  misc_feature 12: /note="2'-Fluoro-guanosine"
  misc_feature 13: /note="2'-O-Methyluridine"
  misc_feature 14: /note="2'-Fluoro-guanosine"
  misc_feature 15: /note="2'-O-Methyladenosine"
  misc_feature 16: /note="2'-Fluoro-cytidine"
  misc_feature 17: /note="2'-O-Methyluridine"
  misc_feature 18: /note="2'- fluoro-uridine"
  misc_feature 19: /note="2'-O-Methyluridine"
  misc_feature 20: /note="2'- fluoro-uridine"
  misc_feature 21: /note="2'-O-Methyluridine"
  misc_feature 22: /note="2'-fluoroadenosine"
  misc_feature 23: /note="2'-O-Methyladenosine"
  misc_feature 24: /note="2'-fluoroadenosine"
  misc_feature 25: /note="Inverted DNA thymine"
ccauuaauauggugacuuuuuaaat

SEQ ID NO: 563 - RNA, 23 nt, Artificial Sequence
  Synthetic Construct
  misc_feature 1: /note="2'- fluoro-uridine"
  misc_feature 2: /note="2'- fluoro-uridine"
  misc_feature 3: /note="2'-O-Methyluridine"
  misc_feature 4: /note="2'-fluoroadenosine"
  misc_feature 5: /note="2'-O-Methyladenosine"
  misc_feature 6: /note="2'-fluoroadenosine"
  misc_feature 7: /note="2'-O-Methyladenosine"
  misc_feature 8: /note="2'-fluoroadenosine"
  misc_feature 9: /note="2'-O-Methylguanosine"
  misc_feature 10: /note="2'- fluoro-uridine"
  misc_feature 11: /note="2'-O-Methylcytidine"
  misc_feature 12: /note="2'-fluoroadenosine"
  misc_feature 13: /note="2'-O-Methylcytidine"
  misc_feature 14: /note="2'-Fluoro-cytidine"
  misc_feature 15: /note="2'-O-Methyladenosine"
  misc_feature 16: /note="2'- fluoro-uridine"
  misc_feature 17: /note="2'-O-Methyladenosine"
  misc_feature 18: /note="2'- fluoro-uridine"
  misc_feature 19: /note="2'-O-Methyluridine"
  misc_feature 20: /note="2'-fluoroadenosine"
  misc_feature 21: /note="2'-O-Methyladenosine"
  misc_feature 22: /note="DNA thymine"
  misc_feature 23: /note="DNA thymine"
uuuaaaaagucaccauauuaatt

SEQ ID NO: 564 - RNA, 25 nt, Artificial Sequence
  Synthetic Construct
  misc_feature 1: /note="2'-O-Methylcytidine"
  misc_feature 2: /note="2'-O-Methylcytidine"
  misc_feature 3: /note="2'-O-Methyladenosine"
  misc_feature 4: /note="2'- fluoro-uridine"
  misc_feature 5: /note="2'-O-Methyladenosine"
  misc_feature 6: /note="2'-fluoroadenosine"
  misc_feature 7: /note="2'-O-Methyluridine"
  misc_feature 8: /note="2'-fluoroadenosine"
  misc_feature 9: /note="2'-O-Methyluridine"
  misc_feature 10: /note="2'-Fluoro-guanosine"
  misc_feature 11: /note="2'-Fluoro-guanosine"
  misc_feature 12: /note="2'- fluoro-uridine"
  misc_feature 13: /note="2'-Fluoro-guanosine"
  misc_feature 14: /note="2'-fluoroadenosine"
  misc_feature 15: /note="2'-O-Methylcytidine"
  misc_feature 16: /note="2'- fluoro-uridine"
  misc_feature 17: /note="2'-O-Methyluridine"
  misc_feature 18: /note="2'- fluoro-uridine"
  misc_feature 19: /note="2'-O-Methyluridine"
  misc_feature 20: /note="2'- fluoro-uridine"
  misc_feature 21: /note="2'-O-Methyladenosine"
  misc_feature 22: /note="2'-fluoroadenosine"
  misc_feature 23: /note="2'-O-Methyladenosine"
  misc_feature 24: /note="2'-fluoroadenosine"
  misc_feature 25: /note="Inverted DNA thymine"
ccauaauauggugacuuuuuaaaat

SEQ ID NO: 565 - RNA, 23 nt, Artificial Sequence
  Synthetic Construct
  misc_feature 1: /note="2'- fluoro-uridine"
  misc_feature 2: /note="2'- fluoro-uridine"
  misc_feature 3: /note="2'-O-Methyluridine"
  misc_feature 4: /note="2'- fluoro-uridine"
  misc_feature 5: /note="2'-O-Methyladenosine"
  misc_feature 6: /note="2'-fluoroadenosine"
  misc_feature 7: /note="2'-O-Methyladenosine"
  misc_feature 8: /note="2'-fluoroadenosine"
  misc_feature 9: /note="2'-O-Methyladenosine"
  misc_feature 10: /note="2'-Fluoro-guanosine"
  misc_feature 11: /note="2'-O-Methyluridine"
  misc_feature 12: /note="2'-Fluoro-cytidine"
  misc_feature 13: /note="2'-O-Methyladenosine"
  misc_feature 14: /note="2'-Fluoro-cytidine"
  misc_feature 15: /note="2'-O-Methylcytidine"
  misc_feature 16: /note="2'-fluoroadenosine"
  misc_feature 17: /note="2'-O-Methyluridine"
  misc_feature 18: /note="2'-fluoroadenosine"
  misc_feature 19: /note="2'-O-Methyluridine"
  misc_feature 20: /note="2'- fluoro-uridine"
  misc_feature 21: /note="2'-O-Methyladenosine"
  misc_feature 22: /note="DNA thymine"
  misc_feature 23: /note="DNA thymine"
uuuuaaaaagucaccauauuatt

SEQ ID NO: 566 - RNA, 27 nt, Artificial Sequence
  Synthetic Construct
  misc_feature 1: /note="2'-O-Methylcytidine"
  misc_feature 2: /note="2'-O-Methylcytidine"
  misc_feature 3: /note="2'-O-Methyladenosine"
  misc_feature 4: /note="2'-Fluoro-cytidine"
  misc_feature 5: /note="2'-O-Methyladenosine"
  misc_feature 6: /note="2'- fluoro-uridine"
  misc_feature 7: /note="2'-O-Methyluridine"
  misc_feature 8: /note="2'- fluoro-uridine"
  misc_feature 9: /note="2'-O-Methyluridine"
  misc_feature 10: /note="2'- fluoro-uridine"
  misc_feature 11: /note="2'-O-Methyladenosine"
  misc_feature 12: /note="2'- fluoro-uridine"
  misc_feature 13: /note="2'-O-Methyluridine"
  misc_feature 14: /note="2'-fluoroadenosine"
  misc_feature 15: /note="2'-O-Methyladenosine"
  misc_feature 16: /note="2'- fluoro-uridine"
  misc_feature 17: /note="2'-O-Methyladenosine"
  misc_feature 18: /note="2'- fluoro-uridine"
  misc_feature 19: /note="2'-Fluoro-guanosine"
  misc_feature 20: /note="2'-Fluoro-guanosine"
  misc_feature 21: /note="2'-O-Methyluridine"
  misc_feature 22: /note="2'-Fluoro-guanosine"
  misc_feature 23: /note="2'-O-Methyladenosine"
  misc_feature 24: /note="2'-Fluoro-cytidine"
  misc_feature 25: /note="2'-O-Methyluridine"
  misc_feature 26: /note="2'- fluoro-uridine"
  misc_feature 27: /note="Inverted DNA thymine"
ccacauuuuuauuaauauggugacuut

SEQ ID NO: 567 - RNA, 25 nt, Artificial Sequence
  Synthetic Construct
  misc_feature 1: /note="2'-fluoroadenosine"
  misc_feature 2: /note="2'-fluoroadenosine"
  misc_feature 3: /note="2'-Fluoro-guanosine"
  misc_feature 4: /note="2'- fluoro-uridine"
  misc_feature 5: /note="2'-O-Methylcytidine"
  misc_feature 6: /note="2'-fluoroadenosine"
  misc_feature 7: /note="2'-O-Methylcytidine"
  misc_feature 8: /note="2'-Fluoro-cytidine"
  misc_feature 9: /note="2'-O-Methyladenosine"
  misc_feature 10: /note="2'- fluoro-uridine"
  misc_feature 11: /note="2'-O-Methyladenosine"
  misc_feature 12: /note="2'- fluoro-uridine"
  misc_feature 13: /note="2'-O-Methyluridine"
  misc_feature 14: /note="2'-fluoroadenosine"
  misc_feature 15: /note="2'-O-Methyladenosine"
  misc_feature 16: /note="2'- fluoro-uridine"
  misc_feature 17: /note="2'-O-Methyladenosine"
  misc_feature 18: /note="2'-fluoroadenosine"
  misc_feature 19: /note="2'-O-Methyladenosine"
  misc_feature 20: /note="2'-fluoroadenosine"
  misc_feature 21: /note="2'-O-Methyladenosine"
  misc_feature 22: /note="2'- fluoro-uridine"
  misc_feature 23: /note="2'-Fluoro-guanosine"
  misc_feature 24: /note="DNA thymine"
  misc_feature 25: /note="DNA thymine"
aagucaccauauuaauaaaaaugtt

SEQ ID NO: 568 - RNA, 27 nt, Artificial Sequence
  Synthetic Construct
  misc_feature 1: /note="2'-O-Methylcytidine"
  misc_feature 2: /note="2'-O-Methylcytidine"
  misc_feature 3: /note="2'-O-Methyladenosine"
  misc_feature 4: /note="2'- fluoro-uridine"
  misc_feature 5: /note="2'-O-Methyluridine"
  misc_feature 6: /note="2'- fluoro-uridine"
  misc_feature 7: /note="2'-O-Methyluridine"
  misc_feature 8: /note="2'-fluoroadenosine"
  misc_feature 9: /note="2'-O-Methyluridine"
  misc_feature 10: /note="2'- fluoro-uridine"
  misc_feature 11: /note="2'-O-Methyladenosine"
  misc_feature 12: /note="2'-fluoroadenosine"
  misc_feature 13: /note="2'-O-Methyluridine"
  misc_feature 14: /note="2'-fluoroadenosine"
  misc_feature 15: /note="2'-O-Methyluridine"
  misc_feature 16: /note="2'-Fluoro-guanosine"
  misc_feature 17: /note="2'-Fluoro-guanosine"
  misc_feature 18: /note="2'- fluoro-uridine"
  misc_feature 19: /note="2'-Fluoro-guanosine"
  misc_feature 20: /note="2'-fluoroadenosine"
  misc_feature 22: /note="2'- fluoro-uridine"
  misc_feature 23: /note="2'-O-Methyluridine"
  misc_feature 24: /note="2'- fluoro-uridine"
  misc_feature 25: /note="2'-O-Methyluridine"
  misc_feature 26: /note="2'- fluoro-uridine"
  misc_feature 27: /note="Inverted DNA thymine"
ccauuuuauuaauauggugacuuuuut

SEQ ID NO: 569 - RNA, 25 nt, Artificial Sequence
  Synthetic Construct
  misc_feature 1: /note="2'-fluoroadenosine"
  misc_feature 2: /note="2'-fluoroadenosine"
  misc_feature 3: /note="2'-O-Methyladenosine"
  misc_feature 4: /note="2'-fluoroadenosine"
  misc_feature 5: /note="2'-O-Methyladenosine"
  misc_feature 6: /note="2'-Fluoro-guanosine"
  misc_feature 7: /note="2'-O-Methyluridine"
  misc_feature 8: /note="2'-Fluoro-cytidine"
  misc_feature 9: /note="2'-O-Methyladenosine"
  misc_feature 10: /note="2'-Fluoro-cytidine"
  misc_feature 11: /note="2'-O-Methylcytidine"
  misc_feature 12: /note="2'-fluoroadenosine"
  misc_feature 13: /note="2'-O-Methyluridine"
  misc_feature 14: /note="2'-fluoroadenosine"
  misc_feature 15: /note="2'-O-Methyluridine"
  misc_feature 16: /note="2'- fluoro-uridine"
  misc_feature 17: /note="2'-O-Methyladenosine"
  misc_feature 18: /note="2'-fluoroadenosine"
  misc_feature 19: /note="2'-O-Methyluridine"
  misc_feature 20: /note="2'-fluoroadenosine"
  misc_feature 21: /note="2'-O-Methyladenosine"
  misc_feature 22: /note="2'-fluoroadenosine"
  misc_feature 23: /note="2'-O-Methyladenosine"
  misc_feature 24: /note="DNA thymine"
  misc_feature 25: /note="DNA thymine"
aaaaagucaccauauuaauaaaatt

SEQ ID NO: 570 - RNA, 27 nt, Artificial Sequence
  Synthetic Construct
  misc_feature 1: /note="2'-O-Methylcytidine"
  misc_feature 2: /note="2'-O-Methylcytidine"
  misc_feature 3: /note="2'-O-Methyladenosine"
  misc_feature 4: /note="2'- fluoro-uridine"
  misc_feature 5: /note="2'-O-Methyladenosine"
  misc_feature 6: /note="2'- fluoro-uridine"
  misc_feature 7: /note="2'-O-Methyluridine"
  misc_feature 8: /note="2'-fluoroadenosine"
  misc_feature 9: /note="2'-O-Methyladenosine"
  misc_feature 10: /note="2'- fluoro-uridine"
  misc_feature 11: /note="2'-O-Methyladenosine"
  misc_feature 12: /note="2'- fluoro-uridine"
  misc_feature 13: /note="2'-Fluoro-guanosine"
  misc_feature 14: /note="2'-Fluoro-guanosine"
  misc_feature 15: /note="2'-O-Methyluridine"
  misc_feature 16: /note="2'-Fluoro-guanosine"
  misc_feature 17: /note="2'-O-Methyladenosine"
  misc_feature 18: /note="2'-Fluoro-cytidine"
  misc_feature 19: /note="2'-O-Methyluridine"
  misc_feature 20: /note="2'- fluoro-uridine"
  misc_feature 21: /note="2'-O-Methyluridine"
  misc_feature 22: /note="2'- fluoro-uridine"
  misc_feature 23: /note="2'-O-Methyluridine"
  misc_feature 24: /note="2'-fluoroadenosine"
  misc_feature 25: /note="2'-O-Methyladenosine"
  misc_feature 26: /note="2'-fluoroadenosine"
  misc_feature 27: /note="Inverted DNA thymine"
ccauauuaauauggugacuuuuuaaat

SEQ ID NO: 571 - RNA, 25 nt, Artificial Sequence
  Synthetic Construct
  misc_feature 1: /note="2'- fluoro-uridine"
  misc_feature 2: /note="2'- fluoro-uridine"
  misc_feature 3: /note="2'-O-Methyluridine"
  misc_feature 4: /note="2'-fluoroadenosine"
  misc_feature 5: /note="2'-O-Methyladenosine"
  misc_feature 6: /note="2'-fluoroadenosine"
  misc_feature 7: /note="2'-O-Methyladenosine"
  misc_feature 8: /note="2'-fluoroadenosine"
  misc_feature 9: /note="2'-Fluoro-guanosine"
  misc_feature 10: /note="2'- fluoro-uridine"
  misc_feature 11: /note="2'-O-Methylcytidine"
  misc_feature 12: /note="2'-fluoroadenosine"
  misc_feature 13: /note="2'-O-Methylcytidine"
  misc_feature 14: /note="2'-Fluoro-cytidine"
  misc_feature 15: /note="2'-O-Methyladenosine"
  misc_feature 16: /note="2'- fluoro-uridine"
  misc_feature 17: /note="2'-O-Methyladenosine"
  misc_feature 18: /note="2'- fluoro-uridine"
  misc_feature 19: /note="2'-O-Methyluridine"
  misc_feature 20: /note="2'-fluoroadenosine"
  misc_feature 21: /note="2'-O-Methyladenosine"
  misc_feature 22: /note="2'- fluoro-uridine"
  misc_feature 23: /note="2'-O-Methyladenosine"
  misc_feature 24: /note="DNA thymine"
  misc_feature 25: /note="DNA thymine"
uuuaaaaagucaccauauuaauatt

SEQ ID NO: 572 - RNA, 27 nt, Artificial Sequence
  Synthetic Construct
  misc_feature 1: /note="2'-O-Methylcytidine"
  misc_feature 2: /note="2'-O-Methylcytidine"
  misc_feature 3: /note="2'-O-Methyladenosine"
  misc_feature 4: /note="2'-fluoroadenosine"
  misc_feature 5: /note="2'-O-Methyluridine"
  misc_feature 6: /note="2'- fluoro-uridine"
  misc_feature 7: /note="2'-O-Methyladenosine"
  misc_feature 8: /note="2'-fluoroadenosine"
  misc_feature 9: /note="2'-O-Methyluridine"
  misc_feature 10: /note="2'-fluoroadenosine"
  misc_feature 11: /note="2'-O-Methyluridine"
  misc_feature 12: /note="2'-Fluoro-guanosine"
  misc_feature 13: /note="2'-Fluoro-guanosine"
  misc_feature 14: /note="2'- fluoro-uridine"
  misc_feature 15: /note="2'-Fluoro-guanosine"
  misc_feature 16: /note="2'-fluoroadenosine"
  misc_feature 17: /note="2'-O-Methylcytidine"
  misc_feature 18: /note="2'- fluoro-uridine"
  misc_feature 19: /note="2'-O-Methyluridine"
  misc_feature 20: /note="2'- fluoro-uridine"
  misc_feature 21: /note="2'-O-Methyluridine"
  misc_feature 22: /note="2'- fluoro-uridine"
  misc_feature 23: /note="2'-O-Methyladenosine"
  misc_feature 24: /note="2'-fluoroadenosine"
  misc_feature 25: /note="2'-O-Methyladenosine"
  misc_feature 26: /note="2'-fluoroadenosine"
  misc_feature 27: /note="Inverted DNA thymine"
ccaauuaauauggugacuuuuuaaaat

SEQ ID NO: 573 - RNA, 25 nt, Artificial Sequence
  Synthetic Construct
  misc_feature 1: /note="2'- fluoro-uridine"
  misc_feature 2: /note="2'- fluoro-uridine"
  misc_feature 3: /note="2'-O-Methyluridine"
  misc_feature 4: /note="2'- fluoro-uridine"
  misc_feature 5: /note="2'-O-Methyladenosine"
  misc_feature 6: /note="2'-fluoroadenosine"
  misc_feature 7: /note="2'-O-Methyladenosine"
  misc_feature 8: /note="2'-fluoroadenosine"
  misc_feature 9: /note="2'-O-Methyladenosine"
  misc_feature 10: /note="2'-Fluoro-guanosine"
  misc_feature 11: /note="2'-O-Methyluridine"
  misc_feature 12: /note="2'-Fluoro-cytidine"
  misc_feature 13: /note="2'-O-Methyladenosine"
  misc_feature 14: /note="2'-Fluoro-cytidine"
  misc_feature 15: /note="2'-O-Methylcytidine"
  misc_feature 16: /note="2'-fluoroadenosine"
  misc_feature 17: /note="2'-O-Methyluridine"
  misc_feature 18: /note="2'-fluoroadenosine"
  misc_feature 19: /note="2'-O-Methyluridine"
  misc_feature 20: /note="2'- fluoro-uridine"
  misc_feature 21: /note="2'-O-Methyladenosine"
  misc_feature 22: /note="2'-fluoroadenosine"
  misc_feature 23: /note="2'-O-Methyluridine"
  misc_feature 24: /note="DNA thymine"
  misc_feature 25: /note="DNA thymine"
uuuuaaaaagucaccauauuaautt

SEQ ID NO: 574 - RNA, 27 nt, Artificial Sequence
  Synthetic Construct
  misc_feature 1: /note="2'-O-Methylcytidine"
  misc_feature 2: /note="2'-O-Methylcytidine"
  misc_feature 3: /note="2'-O-Methyladenosine"
  misc_feature 4: /note="2'- fluoro-uridine"
  misc_feature 5: /note="2'-O-Methyluridine"
  misc_feature 6: /note="2'-fluoroadenosine"
  misc_feature 7: /note="2'-O-Methyladenosine"
  misc_feature 8: /note="2'- fluoro-uridine"
  misc_feature 9: /note="2'-O-Methyladenosine"
  misc_feature 10: /note="2'- fluoro-uridine"
  misc_feature 11: /note="2'-O-Methylguanosine"
  misc_feature 12: /note="2'-Fluoro-guanosine"
  misc_feature 13: /note="2'-O-Methyluridine"
  misc_feature 14: /note="2'-Fluoro-guanosine"
  misc_feature 15: /note="2'-O-Methyladenosine"
  misc_feature 16: /note="2'-Fluoro-cytidine"
  misc_feature 17: /note="2'-O-Methyluridine"
  misc_feature 18: /note="2'- fluoro-uridine"
  misc_feature 19: /note="2'-O-Methyluridine"
  misc_feature 20: /note="2'- fluoro-uridine"
  misc_feature 21: /note="2'-O-Methyluridine"
  misc_feature 22: /note="2'-fluoroadenosine"
  misc_feature 23: /note="2'-O-Methyladenosine"
  misc_feature 24: /note="2'-fluoroadenosine"
  misc_feature 25: /note="2'-O-Methyladenosine"
  misc_feature 26: /note="2'- fluoro-uridine"
  misc_feature 27: /note="Inverted DNA thymine"
ccauuaauauggugacuuuuuaaaaut

SEQ ID NO: 575 - RNA, 25 nt, Artificial Sequence
  Synthetic Construct
  misc_feature 1: /note="2'-fluoroadenosine"
  misc_feature 2: /note="2'- fluoro-uridine"
  misc_feature 3: /note="2'-O-Methyluridine"
  misc_feature 4: /note="2'- fluoro-uridine"
  misc_feature 5: /note="2'-O-Methyluridine"
  misc_feature 6: /note="2'-fluoroadenosine"
  misc_feature 7: /note="2'-O-Methyladenosine"
  misc_feature 8: /note="2'-fluoroadenosine"
  misc_feature 9: /note="2'-O-Methyladenosine"
  misc_feature 10: /note="2'-fluoroadenosine"
  misc_feature 11: /note="2'-O-Methylguanosine"
  misc_feature 12: /note="2'- fluoro-uridine"
  misc_feature 13: /note="2'-O-Methylcytidine"
  misc_feature 14: /note="2'-fluoroadenosine"
  misc_feature 15: /note="2'-O-Methylcytidine"
  misc_feature 16: /note="2'-Fluoro-cytidine"
  misc_feature 17: /note="2'-O-Methyladenosine"
  misc_feature 18: /note="2'- fluoro-uridine"
  misc_feature 19: /note="2'-O-Methyladenosine"
  misc_feature 20: /note="2'- fluoro-uridine"
  misc_feature 21: /note="2'-O-Methyluridine"
  misc_feature 22: /note="2'-fluoroadenosine"
  misc_feature 23: /note="2'-O-Methyladenosine"
  misc_feature 24: /note="DNA thymine"
  misc_feature 25: /note="DNA thymine"
auuuuaaaaagucaccauauuaatt

SEQ ID NO: 576 - RNA, 25 nt, Artificial Sequence
  Synthetic Construct
uuuguagcauuuuuauuaauauggu

SEQ ID NO: 577 - RNA, 19 nt, Artificial Sequence
  Synthetic Construct
auuuuuauuaauaugguga

SEQ ID NO: 578 - RNA, 22 nt, Artificial Sequence
  ss C027.001
  misc_feature 1: /note="T is a lgT3 nucleotide analog"
  misc_feature 1: /note="The nucleotide in position 1 and the nucleotide in position 2 are linked through a phosphodiester linkage"
  misc_feature 2: /note="T is a lgT3 nucleotide analog"
  misc_feature 2: /note="The nucleotide in position 2 and the nucleotide in position 1 are linked through a phosphodiester linkage"
  misc_feature 2: /note="The nucleotide in position 2 and the nucleotide in position 3 are linked through a phosphodiester linkage"
  misc_feature 3: /note="T is a lgT3 nucleotide analog"
  misc_feature 3: /note="The nucleotide in position 3 and the nucleotide in position 2 are linked through a phosphodiester linkage"
  misc_feature 3: /note="The nucleotide in position 3 and the nucleotide in position 4 are linked through a phosphodiester linkage"
  misc_feature 4: /note="U is a 2'-fluoro-uridine (fU)"
  misc_feature 4: /note="The nucleotide in position 4 and the nucleotide in position 3 are linked through a phosphodiester linkage"
  misc_feature 4: /note="The nucleotide in position 4 and the nucleotide in position 5 are linked through a phosphodiester linkage"
  misc_feature 5: /note="A is a 2'-O-Methyladenosine (mA)"
  misc_feature 5: /note="The nucleotide in position 5 and the nucleotide in position 4 are linked through a phosphodiester linkage"
  misc_feature 5: /note="The nucleotide in position 5 and the nucleotide in position 6 are linked through a phosphodiester linkage"
  misc_feature 6: /note="U is a 2'-fluoro-uridine (fU)"
  misc_feature 6: /note="The nucleotide in position 6 and the nucleotide in position 5 are linked through a phosphodiester linkage"
  misc_feature 6: /note="The nucleotide in position 6 and the nucleotide in position 7 are linked through a phosphodiester linkage"
  misc_feature 7: /note="G is a 2'-O-Methylguanosine (mG)"
  misc_feature 7: /note="The nucleotide in position 7 and the nucleotide in position 6 are linked through a phosphodiester linkage"
  misc_feature 7: /note="The nucleotide in position 7 and the nucleotide in position 8 are linked through a phosphodiester linkage"
  misc_feature 8: /note="G is a 2'-fluoro-guanosine (fG)"
  misc_feature 8: /note="The nucleotide in position 8 and the nucleotide in position 7 are linked through a phosphodiester linkage"
  misc_feature 8: /note="The nucleotide in position 8 and the nucleotide in position 9 are linked through a phosphodiester linkage"
  misc_feature 9: /note="U is a 2'-O-Methyluridine (mU)"
  misc_feature 9: /note="The nucleotide in position 9 and the nucleotide in position 8 are linked through a phosphodiester linkage"
  misc_feature 9: /note="The nucleotide in position 9 and the nucleotide in position 10 are linked through a phosphodiester linkage"
  misc_feature 10: /note="G is a 2'-fluoro-guanosine (fG)"
  misc_feature 10: /note="The nucleotide in position 10 and the nucleotide in position 9 are linked through a phosphodiester linkage"
  misc_feature 10: /note="The nucleotide in position 10 and the nucleotide in position 11 are linked through a phosphodiester linkage"
  misc_feature 11: /note="A is a 2'-O-Methyladenosine (mA)"
  misc_feature 11: /note="The nucleotide in position 11 and the nucleotide in position 10 are linked through a phosphodiester linkage"
  misc_feature 11: /note="The nucleotide in position 11 and the nucleotide in position 12 are linked through a phosphodiester linkage"
  misc_feature 12: /note="C is a 2'-fluoro-cytidine (fC)"
  misc_feature 12: /note="The nucleotide in position 12 and the nucleotide in position 11 are linked through a phosphodiester linkage"
  misc_feature 12: /note="The nucleotide in position 12 and the nucleotide in position 13 are linked through a phosphodiester linkage"
  misc_feature 13: /note="U is a 2'-O-Methyluridine (mU)"
  misc_feature 13: /note="The nucleotide in position 13 and the nucleotide in position 12 are linked through a phosphodiester linkage"
  misc_feature 13: /note="The nucleotide in position 13 and the nucleotide in position 14 are linked through a phosphodiester linkage"
  misc_feature 14: /note="U is a 2'-fluoro-uridine (fU)"
  misc_feature 14: /note="The nucleotide in position 14 and the nucleotide in position 13 are linked through a phosphodiester linkage"
  misc_feature 14: /note="The nucleotide in position 14 and the nucleotide in position 15 are linked through a phosphodiester linkage"
  misc_feature 15: /note="U is a 2'-O-Methyluridine (mU)"
  misc_feature 15: /note="The nucleotide in position 15 and the nucleotide in position 14 are linked through a phosphodiester linkage"
  misc_feature 15: /note="The nucleotide in position 15 and the nucleotide in position 16 are linked through a phosphodiester linkage"
  misc_feature 16: /note="U is a 2'-fluoro-uridine (fU)"
  misc_feature 16: /note="The nucleotide in position 16 and the nucleotide in position 15 are linked through a phosphodiester linkage"
  misc_feature 16: /note="The nucleotide in position 16 and the nucleotide in position 17 are linked through a phosphodiester linkage"
  misc_feature 17: /note="U is a 2'-O-Methyluridine (mU)"
  misc_feature 17: /note="The nucleotide in position 17 and the nucleotide in position 16 are linked through a phosphodiester linkage"
  misc_feature 17: /note="The nucleotide in position 17 and the nucleotide in position 18 are linked through a phosphodiester linkage"
  misc_feature 18: /note="A is a 2'-fluoro-adenosine (fA)"
  misc_feature 18: /note="The nucleotide in position 18 and the nucleotide in position 17 are linked through a phosphodiester linkage"
  misc_feature 18: /note="The nucleotide in position 18 and the nucleotide in position 19 are linked through a phosphodiester linkage"
  misc_feature 19: /note="A is a 2'-O-Methyladenosine (mA)"
  misc_feature 19: /note="The nucleotide in position 19 and the nucleotide in position 18 are linked through a phosphodiester linkage"
  misc_feature 19: /note="The nucleotide in position 19 and the nucleotide in position 20 are linked through a phosphodiester linkage"
  misc_feature 20: /note="A is a 2'-fluoro-adenosine (fA)"
  misc_feature 20: /note="The nucleotide in position 20 and the nucleotide in position 19 are linked through a phosphodiester linkage"
  misc_feature 20: /note="The nucleotide in position 20 and the nucleotide in position 21 are linked through a phosphorothioate linkage"
  misc_feature 21: /note="A is a 2'-O-Methyladenosine (mA)"
  misc_feature 21: /note="The nucleotide in position 21 and the nucleotide in position 20 are linked through a phosphorothioate linkage"
  misc_feature 21: /note="The nucleotide in position 21 and the nucleotide in position 22 are linked through a phosphorothioate linkage"
  misc_feature 22: /note="U is a 2'-fluoro-uridine (fU)"
  misc_feature 22: /note="The nucleotide in position 22 and the nucleotide in position 21 are linked through a phosphorothioate linkage"
tttuauggugacuuuuuaaaau

SEQ ID NO: 579 - RNA, 22 nt, Artificial Sequence
  ss C027.001#01 to #05
  misc_feature 1: /note="T is a lgT3 nucleotide analog"
  misc_feature 1: /note="The nucleotide in position 1 and the nucleotide in position 2 are linked through a phosphodiester linkage"
  misc_feature 2: /note="T is a lgT3 nucleotide analog"
  misc_feature 2: /note="The nucleotide in position 2 and the nucleotide in position 1 are linked through a phosphodiester linkage"
  misc_feature 2: /note="The nucleotide in position 2 and the nucleotide in position 3 are linked through a phosphodiester linkage"
  misc_feature 3: /note="T is a lgT3 nucleotide analog"
  misc_feature 3: /note="The nucleotide in position 3 and the nucleotide in position 2 are linked through a phosphodiester linkage"
  misc_feature 3: /note="The nucleotide in position 3 and the nucleotide in position 4 are linked through a phosphodiester linkage"
  misc_feature 4: /note="U is a 2'-O-Methyluridine (mU)"
  misc_feature 4: /note="The nucleotide in position 4 and the nucleotide in position 3 are linked through a phosphodiester linkage"
  misc_feature 4: /note="The nucleotide in position 4 and the nucleotide in position 5 are linked through a phosphodiester linkage"
  misc_feature 5: /note="A is a 2'-O-Methyladenosine (mA)"
  misc_feature 5: /note="The nucleotide in position 5 and the nucleotide in position 4 are linked through a phosphodiester linkage"
  misc_feature 5: /note="The nucleotide in position 5 and the nucleotide in position 6 are linked through a phosphodiester linkage"
  misc_feature 6: /note="U is a 2'-O-Methyluridine (mU)"
  misc_feature 6: /note="The nucleotide in position 6 and the nucleotide in position 5 are linked through a phosphodiester linkage"
  misc_feature 6: /note="The nucleotide in position 6 and the nucleotide in position 7 are linked through a phosphodiester linkage"
  misc_feature 7: /note="G is a 2'-O-Methylguanosine (mG)"
  misc_feature 7: /note="The nucleotide in position 7 and the nucleotide in position 6 are linked through a phosphodiester linkage"
  misc_feature 7: /note="The nucleotide in position 7 and the nucleotide in position 8 are linked through a phosphodiester linkage"
  misc_feature 8: /note="G is a 2'-fluoro-guanosine (fG)"
  misc_feature 8: /note="The nucleotide in position 8 and the nucleotide in position 7 are linked through a phosphodiester linkage"
  misc_feature 8: /note="The nucleotide in position 8 and the nucleotide in position 9 are linked through a phosphodiester linkage"
  misc_feature 9: /note="U is a 2'-O-Methyluridine (mU)"
  misc_feature 9: /note="The nucleotide in position 9 and the nucleotide in position 8 are linked through a phosphodiester linkage"
  misc_feature 9: /note="The nucleotide in position 9 and the nucleotide in position 10 are linked through a phosphodiester linkage"
  misc_feature 10: /note="G is a 2'-fluoro-guanosine (fG)"
  misc_feature 10: /note="The nucleotide in position 10 and the nucleotide in position 9 are linked through a phosphodiester linkage"
  misc_feature 10: /note="The nucleotide in position 10 and the nucleotide in position 11 are linked through a phosphodiester linkage"
  misc_feature 11: /note="A is a 2'-fluoro-adenosine (fA)"
  misc_feature 11: /note="The nucleotide in position 11 and the nucleotide in position 10 are linked through a phosphodiester linkage"
  misc_feature 11: /note="The nucleotide in position 11 and the nucleotide in position 12 are linked through a phosphodiester linkage"
  misc_feature 12: /note="C is a 2'-fluoro-cytidine (fC)"
  misc_feature 12: /note="The nucleotide in position 12 and the nucleotide in position 11 are linked through a phosphodiester linkage"
  misc_feature 12: /note="The nucleotide in position 12 and the nucleotide in position 13 are linked through a phosphodiester linkage"
  misc_feature 13: /note="U is a 2'-O-Methyluridine (mU)"
  misc_feature 13: /note="The nucleotide in position 13 and the nucleotide in position 12 are linked through a phosphodiester linkage"
  misc_feature 13: /note="The nucleotide in position 13 and the nucleotide in position 14 are linked through a phosphodiester linkage"
  misc_feature 14: /note="U is a 2'-O-Methyluridine (mU)"
  misc_feature 14: /note="The nucleotide in position 14 and the nucleotide in position 13 are linked through a phosphodiester linkage"
  misc_feature 14: /note="The nucleotide in position 14 and the nucleotide in position 15 are linked through a phosphodiester linkage"
  misc_feature 15: /note="U is a 2'-O-Methyluridine (mU)"
  misc_feature 15: /note="The nucleotide in position 15 and the nucleotide in position 14 are linked through a phosphodiester linkage"
  misc_feature 15: /note="The nucleotide in position 15 and the nucleotide in position 16 are linked through a phosphodiester linkage"
  misc_feature 16: /note="U is a 2'-O-Methyluridine (mU)"
  misc_feature 16: /note="The nucleotide in position 16 and the nucleotide in position 15 are linked through a phosphodiester linkage"
  misc_feature 16: /note="The nucleotide in position 16 and the nucleotide in position 17 are linked through a phosphodiester linkage"
  misc_feature 17: /note="U is a 2'-O-Methyluridine (mU)"
  misc_feature 17: /note="The nucleotide in position 17 and the nucleotide in position 16 are linked through a phosphodiester linkage"
  misc_feature 17: /note="The nucleotide in position 17 and the nucleotide in position 18 are linked through a phosphodiester linkage"
  misc_feature 18: /note="A is a 2'-O-Methyladenosine (mA)"
  misc_feature 18: /note="The nucleotide in position 18 and the nucleotide in position 17 are linked through a phosphodiester linkage"
  misc_feature 18: /note="The nucleotide in position 18 and the nucleotide in position 19 are linked through a phosphodiester linkage"
  misc_feature 19: /note="A is a 2'-O-Methyladenosine (mA)"
  misc_feature 19: /note="The nucleotide in position 19 and the nucleotide in position 18 are linked through a phosphodiester linkage"
  misc_feature 19: /note="The nucleotide in position 19 and the nucleotide in position 20 are linked through a phosphodiester linkage"
  misc_feature 20: /note="A is a 2'-O-Methyladenosine (mA)"
  misc_feature 20: /note="The nucleotide in position 20 and the nucleotide in position 19 are linked through a phosphodiester linkage"
  misc_feature 20: /note="The nucleotide in position 20 and the nucleotide in position 21 are linked through a phosphorothioate linkage"
  misc_feature 21: /note="A is a 2'-O-Methyladenosine (mA)"
  misc_feature 21: /note="The nucleotide in position 21 and the nucleotide in position 20 are linked through a phosphorothioate linkage"
  misc_feature 21: /note="The nucleotide in position 21 and the nucleotide in position 22 are linked through a phosphorothioate linkage"
  misc_feature 22: /note="U is a 2'-O-Methyluridine (mU)"
  misc_feature 22: /note="The nucleotide in position 22 and the nucleotide in position 21 are linked through a phosphorothioate linkage"
tttuauggugacuuuuuaaaau

SEQ ID NO: 580 - RNA, 22 nt, Artificial Sequence
  ss C027.001#06 to #10
  misc_feature 1: /note="T is a lgT3 nucleotide analog"
  misc_feature 1: /note="The nucleotide in position 1 and the nucleotide in position 2 are linked through a phosphodiester linkage"
  misc_feature 2: /note="T is a lgT3 nucleotide analog"
  misc_feature 2: /note="The nucleotide in position 2 and the nucleotide in position 1 are linked through a phosphodiester linkage"
  misc_feature 2: /note="The nucleotide in position 2 and the nucleotide in position 3 are linked through a phosphodiester linkage"
  misc_feature 3: /note="T is a lgT3 nucleotide analog"
  misc_feature 3: /note="The nucleotide in position 3 and the nucleotide in position 2 are linked through a phosphodiester linkage"
  misc_feature 3: /note="The nucleotide in position 3 and the nucleotide in position 4 are linked through a phosphodiester linkage"
  misc_feature 4: /note="U is a locked uracil (lU)"
  misc_feature 4: /note="The nucleotide in position 4 and the nucleotide in position 3 are linked through a phosphodiester linkage"
  misc_feature 4: /note="The nucleotide in position 4 and the nucleotide in position 5 are linked through a phosphodiester linkage"
  misc_feature 5: /note="A is a locked adenine (lA)"
  misc_feature 5: /note="The nucleotide in position 5 and the nucleotide in position 4 are linked through a phosphodiester linkage"
  misc_feature 5: /note="The nucleotide in position 5 and the nucleotide in position 6 are linked through a phosphodiester linkage"
  misc_feature 6: /note="U is a 2'-O-Methyluridine (mU)"
  misc_feature 6: /note="The nucleotide in position 6 and the nucleotide in position 5 are linked through a phosphodiester linkage"
  misc_feature 6: /note="The nucleotide in position 6 and the nucleotide in position 7 are linked through a phosphodiester linkage"
  misc_feature 7: /note="G is a 2'-O-Methylguanosine (mG)"
  misc_feature 7: /note="The nucleotide in position 7 and the nucleotide in position 6 are linked through a phosphodiester linkage"
  misc_feature 7: /note="The nucleotide in position 7 and the nucleotide in position 8 are linked through a phosphodiester linkage"
  misc_feature 8: /note="G is a 2'-fluoro-guanosine (fG)"
  misc_feature 8: /note="The nucleotide in position 8 and the nucleotide in position 7 are linked through a phosphodiester linkage"
  misc_feature 8: /note="The nucleotide in position 8 and the nucleotide in position 9 are linked through a phosphodiester linkage"
  misc_feature 9: /note="U is a 2'-O-Methyluridine (mU)"
  misc_feature 9: /note="The nucleotide in position 9 and the nucleotide in position 8 are linked through a phosphodiester linkage"
  misc_feature 9: /note="The nucleotide in position 9 and the nucleotide in position 10 are linked through a phosphodiester linkage"
  misc_feature 10: /note="G is a 2'-fluoro-guanosine (fG)"
  misc_feature 10: /note="The nucleotide in position 10 and the nucleotide in position 9 are linked through a phosphodiester linkage"
  misc_feature 10: /note="The nucleotide in position 10 and the nucleotide in position 11 are linked through a phosphodiester linkage"
  misc_feature 11: /note="A is a 2'-fluoro-adenosine (fA)"
  misc_feature 11: /note="The nucleotide in position 11 and the nucleotide in position 10 are linked through a phosphodiester linkage"
  misc_feature 11: /note="The nucleotide in position 11 and the nucleotide in position 12 are linked through a phosphodiester linkage"
  misc_feature 12: /note="C is a 2'-fluoro-cytidine (fC)"
  misc_feature 12: /note="The nucleotide in position 12 and the nucleotide in position 11 are linked through a phosphodiester linkage"
  misc_feature 12: /note="The nucleotide in position 12 and the nucleotide in position 13 are linked through a phosphodiester linkage"
  misc_feature 13: /note="U is a 2'-O-Methyluridine (mU)"
  misc_feature 13: /note="The nucleotide in position 13 and the nucleotide in position 12 are linked through a phosphodiester linkage"
  misc_feature 13: /note="The nucleotide in position 13 and the nucleotide in position 14 are linked through a phosphodiester linkage"
  misc_feature 14: /note="U is a 2'-O-Methyluridine (mU)"
  misc_feature 14: /note="The nucleotide in position 14 and the nucleotide in position 13 are linked through a phosphodiester linkage"
  misc_feature 14: /note="The nucleotide in position 14 and the nucleotide in position 15 are linked through a phosphodiester linkage"
  misc_feature 15: /note="U is a 2'-O-Methyluridine (mU)"
  misc_feature 15: /note="The nucleotide in position 15 and the nucleotide in position 14 are linked through a phosphodiester linkage"
  misc_feature 15: /note="The nucleotide in position 15 and the nucleotide in position 16 are linked through a phosphodiester linkage"
  misc_feature 16: /note="U is a 2'-O-Methyluridine (mU)"
  misc_feature 16: /note="The nucleotide in position 16 and the nucleotide in position 15 are linked through a phosphodiester linkage"
  misc_feature 16: /note="The nucleotide in position 16 and the nucleotide in position 17 are linked through a phosphodiester linkage"
  misc_feature 17: /note="U is a 2'-O-Methyluridine (mU)"
  misc_feature 17: /note="The nucleotide in position 17 and the nucleotide in position 16 are linked through a phosphodiester linkage"
  misc_feature 17: /note="The nucleotide in position 17 and the nucleotide in position 18 are linked through a phosphodiester linkage"
  misc_feature 18: /note="A is a 2'-O-Methyladenosine (mA)"
  misc_feature 18: /note="The nucleotide in position 18 and the nucleotide in position 17 are linked through a phosphodiester linkage"
  misc_feature 18: /note="The nucleotide in position 18 and the nucleotide in position 19 are linked through a phosphodiester linkage"
  misc_feature 19: /note="A is a 2'-O-Methyladenosine (mA)"
  misc_feature 19: /note="The nucleotide in position 19 and the nucleotide in position 18 are linked through a phosphodiester linkage"
  misc_feature 19: /note="The nucleotide in position 19 and the nucleotide in position 20 are linked through a phosphodiester linkage"
  misc_feature 20: /note="A is a 2'-O-Methyladenosine (mA)"
  misc_feature 20: /note="The nucleotide in position 20 and the nucleotide in position 19 are linked through a phosphodiester linkage"
  misc_feature 20: /note="The nucleotide in position 20 and the nucleotide in position 21 are linked through a phosphorothioate linkage"
  misc_feature 21: /note="A is a 2'-O-Methyladenosine (mA)"
  misc_feature 21: /note="The nucleotide in position 21 and the nucleotide in position 20 are linked through a phosphorothioate linkage"
  misc_feature 21: /note="The nucleotide in position 21 and the nucleotide in position 22 are linked through a phosphorothioate linkage"
  misc_feature 22: /note="U is a 2'-O-Methyluridine (mU)"
  misc_feature 22: /note="The nucleotide in position 22 and the nucleotide in position 21 are linked through a phosphorothioate linkage"
tttuauggugacuuuuuaaaau

SEQ ID NO: 581 - RNA, 22 nt, Artificial Sequence
  ss C027.001#11 to #19
  misc_feature 1: /note="T is a lgT3 nucleotide analog"
  misc_feature 1: /note="The nucleotide in position 1 and the nucleotide in position 2 are linked through a phosphodiester linkage"
  misc_feature 2: /note="T is a lgT3 nucleotide analog"
  misc_feature 2: /note="The nucleotide in position 2 and the nucleotide in position 1 are linked through a phosphodiester linkage"
  misc_feature 2: /note="The nucleotide in position 2 and the nucleotide in position 3 are linked through a phosphodiester linkage"
  misc_feature 3: /note="T is a lgT3 nucleotide analog"
  misc_feature 3: /note="The nucleotide in position 3 and the nucleotide in position 2 are linked through a phosphodiester linkage"
  misc_feature 3: /note="The nucleotide in position 3 and the nucleotide in position 4 are linked through a phosphodiester linkage"
  misc_feature 4: /note="U is a 2'-O-Methyluridine (mU)"
  misc_feature 4: /note="The nucleotide in position 4 and the nucleotide in position 3 are linked through a phosphodiester linkage"
  misc_feature 4: /note="The nucleotide in position 4 and the nucleotide in position 5 are linked through a phosphodiester linkage"
  misc_feature 5: /note="A is a 2'-O-Methyladenosine (mA)"
  misc_feature 5: /note="The nucleotide in position 5 and the nucleotide in position 4 are linked through a phosphodiester linkage"
  misc_feature 5: /note="The nucleotide in position 5 and the nucleotide in position 6 are linked through a phosphodiester linkage"
  misc_feature 6: /note="U is a 2'-O-Methyluridine (mU)"
  misc_feature 6: /note="The nucleotide in position 6 and the nucleotide in position 5 are linked through a phosphodiester linkage"
  misc_feature 6: /note="The nucleotide in position 6 and the nucleotide in position 7 are linked through a phosphodiester linkage"
  misc_feature 7: /note="G is a 2'-O-Methylguanosine (mG)"
  misc_feature 7: /note="The nucleotide in position 7 and the nucleotide in position 6 are linked through a phosphodiester linkage"
  misc_feature 7: /note="The nucleotide in position 7 and the nucleotide in position 8 are linked through a phosphodiester linkage"
  misc_feature 8: /note="G is a 2'-fluoro-guanosine (fG)"
  misc_feature 8: /note="The nucleotide in position 8 and the nucleotide in position 7 are linked through a phosphodiester linkage"
  misc_feature 8: /note="The nucleotide in position 8 and the nucleotide in position 9 are linked through a phosphodiester linkage"
  misc_feature 9: /note="U is a 2'-O-Methyluridine (mU)"
  misc_feature 9: /note="The nucleotide in position 9 and the nucleotide in position 8 are linked through a phosphodiester linkage"
  misc_feature 9: /note="The nucleotide in position 9 and the nucleotide in position 10 are linked through a phosphodiester linkage"
  misc_feature 10: /note="G is a 2'-fluoro-guanosine (fG)"
  misc_feature 10: /note="The nucleotide in position 10 and the nucleotide in position 9 are linked through a phosphodiester linkage"
  misc_feature 10: /note="The nucleotide in position 10 and the nucleotide in position 11 are linked through a phosphodiester linkage"
  misc_feature 11: /note="A is a 2'-fluoro-adenosine (fA)"
  misc_feature 11: /note="The nucleotide in position 11 and the nucleotide in position 10 are linked through a phosphodiester linkage"
  misc_feature 11: /note="The nucleotide in position 11 and the nucleotide in position 12 are linked through a phosphodiester linkage"
  misc_feature 12: /note="C is a 2'-fluoro-cytidine (fC)"
  misc_feature 12: /note="The nucleotide in position 12 and the nucleotide in position 11 are linked through a phosphodiester linkage"
  misc_feature 12: /note="The nucleotide in position 12 and the nucleotide in position 13 are linked through a phosphodiester linkage"
  misc_feature 13: /note="U is a 2'-O-Methyluridine (mU)"
  misc_feature 13: /note="The nucleotide in position 13 and the nucleotide in position 12 are linked through a phosphodiester linkage"
  misc_feature 13: /note="The nucleotide in position 13 and the nucleotide in position 14 are linked through a phosphodiester linkage"
  misc_feature 14: /note="U is a 2'-O-Methyluridine (mU)"
  misc_feature 14: /note="The nucleotide in position 14 and the nucleotide in position 13 are linked through a phosphodiester linkage"
  misc_feature 14: /note="The nucleotide in position 14 and the nucleotide in position 15 are linked through a phosphodiester linkage"
  misc_feature 15: /note="U is a 2'-O-Methyluridine (mU)"
  misc_feature 15: /note="The nucleotide in position 15 and the nucleotide in position 14 are linked through a phosphodiester linkage"
  misc_feature 15: /note="The nucleotide in position 15 and the nucleotide in position 16 are linked through a phosphodiester linkage"
  misc_feature 16: /note="U is a 2'-O-Methyluridine (mU)"
  misc_feature 16: /note="The nucleotide in position 16 and the nucleotide in position 15 are linked through a phosphodiester linkage"
  misc_feature 16: /note="The nucleotide in position 16 and the nucleotide in position 17 are linked through a phosphodiester linkage"
  misc_feature 17: /note="U is a 2'-O-Methyluridine (mU)"
  misc_feature 17: /note="The nucleotide in position 17 and the nucleotide in position 16 are linked through a phosphodiester linkage"
  misc_feature 17: /note="The nucleotide in position 17 and the nucleotide in position 18 are linked through a phosphodiester linkage"
  misc_feature 18: /note="A is a 2'-O-Methyladenosine (mA)"
  misc_feature 18: /note="The nucleotide in position 18 and the nucleotide in position 17 are linked through a phosphodiester linkage"
  misc_feature 18: /note="The nucleotide in position 18 and the nucleotide in position 19 are linked through a phosphodiester linkage"
  misc_feature 19: /note="A is a 2'-O-Methyladenosine (mA)"
  misc_feature 19: /note="The nucleotide in position 19 and the nucleotide in position 18 are linked through a phosphodiester linkage"
  misc_feature 19: /note="The nucleotide in position 19 and the nucleotide in position 20 are linked through a phosphodiester linkage"
  misc_feature 20: /note="A is a 2'-O-Methyladenosine (mA)"
  misc_feature 20: /note="The nucleotide in position 20 and the nucleotide in position 19 are linked through a phosphodiester linkage"
  misc_feature 20: /note="The nucleotide in position 20 and the nucleotide in position 21 are linked through a phosphodiester linkage"
  misc_feature 21: /note="T is a LT4 nucleotide analog"
  misc_feature 21: /note="The nucleotide in position 21 and the nucleotide in position 20 are linked through a phosphodiester linkage"
  misc_feature 21: /note="The nucleotide in position 21 and the nucleotide in position 22 are linked through a phosphodiester linkage"
  misc_feature 22: /note="T is a LT4 nucleotide analog"
  misc_feature 22: /note="The nucleotide in position 22 and the nucleotide in position 21 are linked through a phosphodiester linkage"
tttuauggugacuuuuuaaatt

SEQ ID NO: 582 - RNA, 22 nt, Artificial Sequence
  ss C027.001#20 to #28
  misc_feature 1: /note="T is a lgT3 nucleotide analog"
  misc_feature 1: /note="The nucleotide in position 1 and the nucleotide in position 2 are linked through a phosphorothioate linkage"
  misc_feature 2: /note="T is a lgT3 nucleotide analog"
  misc_feature 2: /note="The nucleotide in position 2 and the nucleotide in position 1 are linked through a phosphorothioate linkage"
  misc_feature 2: /note="The nucleotide in position 2 and the nucleotide in position 3 are linked through a phosphorothioate linkage"
  misc_feature 3: /note="T is a lgT3 nucleotide analog"
  misc_feature 3: /note="The nucleotide in position 3 and the nucleotide in position 2 are linked through a phosphorothioate linkage"
  misc_feature 3: /note="The nucleotide in position 3 and the nucleotide in position 4 are linked through a phosphodiester linkage"
  misc_feature 4: /note="U is a 2'-O-Methyluridine (mU)"
  misc_feature 4: /note="The nucleotide in position 4 and the nucleotide in position 3 are linked through a phosphodiester linkage"
  misc_feature 4: /note="The nucleotide in position 4 and the nucleotide in position 5 are linked through a phosphodiester linkage"
  misc_feature 5: /note="A is a 2'-O-Methyladenosine (mA)"
  misc_feature 5: /note="The nucleotide in position 5 and the nucleotide in position 4 are linked through a phosphodiester linkage"
  misc_feature 5: /note="The nucleotide in position 5 and the nucleotide in position 6 are linked through a phosphodiester linkage"
  misc_feature 6: /note="U is a 2'-O-Methyluridine (mU)"
  misc_feature 6: /note="The nucleotide in position 6 and the nucleotide in position 5 are linked through a phosphodiester linkage"
  misc_feature 6: /note="The nucleotide in position 6 and the nucleotide in position 7 are linked through a phosphodiester linkage"
  misc_feature 7: /note="G is a 2'-O-Methylguanosine (mG)"
  misc_feature 7: /note="The nucleotide in position 7 and the nucleotide in position 6 are linked through a phosphodiester linkage"
  misc_feature 7: /note="The nucleotide in position 7 and the nucleotide in position 8 are linked through a phosphodiester linkage"
  misc_feature 8: /note="G is a 2'-fluoro-guanosine (fG)"
  misc_feature 8: /note="The nucleotide in position 8 and the nucleotide in position 7 are linked through a phosphodiester linkage"
  misc_feature 8: /note="The nucleotide in position 8 and the nucleotide in position 9 are linked through a phosphodiester linkage"
  misc_feature 9: /note="U is a 2'-O-Methyluridine (mU)"
  misc_feature 9: /note="The nucleotide in position 9 and the nucleotide in position 8 are linked through a phosphodiester linkage"
  misc_feature 9: /note="The nucleotide in position 9 and the nucleotide in position 10 are linked through a phosphodiester linkage"
  misc_feature 10: /note="G is a 2'-fluoro-guanosine (fG)"
  misc_feature 10: /note="The nucleotide in position 10 and the nucleotide in position 9 are linked through a phosphodiester linkage"
  misc_feature 10: /note="The nucleotide in position 10 and the nucleotide in position 11 are linked through a phosphodiester linkage"
  misc_feature 11: /note="A is a 2'-fluoro-adenosine (fA)"
  misc_feature 11: /note="The nucleotide in position 11 and the nucleotide in position 10 are linked through a phosphodiester linkage"
  misc_feature 11: /note="The nucleotide in position 11 and the nucleotide in position 12 are linked through a phosphodiester linkage"
  misc_feature 12: /note="C is a 2'-fluoro-cytidine (fC)"
  misc_feature 12: /note="The nucleotide in position 12 and the nucleotide in position 11 are linked through a phosphodiester linkage"
  misc_feature 12: /note="The nucleotide in position 12 and the nucleotide in position 13 are linked through a phosphodiester linkage"
  misc_feature 13: /note="U is a 2'-O-Methyluridine (mU)"
  misc_feature 13: /note="The nucleotide in position 13 and the nucleotide in position 12 are linked through a phosphodiester linkage"
  misc_feature 13: /note="The nucleotide in position 13 and the nucleotide in position 14 are linked through a phosphodiester linkage"
  misc_feature 14: /note="U is a 2'-O-Methyluridine (mU)"
  misc_feature 14: /note="The nucleotide in position 14 and the nucleotide in position 13 are linked through a phosphodiester linkage"
  misc_feature 14: /note="The nucleotide in position 14 and the nucleotide in position 15 are linked through a phosphodiester linkage"
  misc_feature 15: /note="U is a 2'-O-Methyluridine (mU)"
  misc_feature 15: /note="The nucleotide in position 15 and the nucleotide in position 14 are linked through a phosphodiester linkage"
  misc_feature 15: /note="The nucleotide in position 15 and the nucleotide in position 16 are linked through a phosphodiester linkage"
  misc_feature 16: /note="U is a 2'-O-Methyluridine (mU)"
  misc_feature 16: /note="The nucleotide in position 16 and the nucleotide in position 15 are linked through a phosphodiester linkage"
  misc_feature 16: /note="The nucleotide in position 16 and the nucleotide in position 17 are linked through a phosphodiester linkage"
  misc_feature 17: /note="U is a 2'-O-Methyluridine (mU)"
  misc_feature 17: /note="The nucleotide in position 17 and the nucleotide in position 16 are linked through a phosphodiester linkage"
  misc_feature 17: /note="The nucleotide in position 17 and the nucleotide in position 18 are linked through a phosphodiester linkage"
  misc_feature 18: /note="A is a 2'-O-Methyladenosine (mA)"
  misc_feature 18: /note="The nucleotide in position 18 and the nucleotide in position 17 are linked through a phosphodiester linkage"
  misc_feature 18: /note="The nucleotide in position 18 and the nucleotide in position 19 are linked through a phosphodiester linkage"
  misc_feature 19: /note="A is a 2'-O-Methyladenosine (mA)"
  misc_feature 19: /note="The nucleotide in position 19 and the nucleotide in position 18 are linked through a phosphodiester linkage"
  misc_feature 19: /note="The nucleotide in position 19 and the nucleotide in position 20 are linked through a phosphodiester linkage"
  misc_feature 20: /note="A is a 2'-O-Methyladenosine (mA)"
  misc_feature 20: /note="The nucleotide in position 20 and the nucleotide in position 19 are linked through a phosphodiester linkage"
  misc_feature 20: /note="The nucleotide in position 20 and the nucleotide in position 21 are linked through a phosphorothioate linkage"
  misc_feature 21: /note="T is a LT4 nucleotide analog"
  misc_feature 21: /note="The nucleotide in position 21 and the nucleotide in position 20 are linked through a phosphorothioate linkage"
  misc_feature 21: /note="The nucleotide in position 21 and the nucleotide in position 22 are linked through a phosphorothioate linkage"
  misc_feature 22: /note="T is a LT4 nucleotide analog"
  misc_feature 22: /note="The nucleotide in position 22 and the nucleotide in position 21 are linked through a phosphorothioate linkage"
tttuauggugacuuuuuaaatt

SEQ ID NO: 583 - RNA, 22 nt, Artificial Sequence
  ss C027.001#29 to #33
  misc_feature 1: /note="T is a lgT3 nucleotide analog"
  misc_feature 1: /note="The nucleotide in position 1 and the nucleotide in position 2 are linked through a phosphodiester linkage"
  misc_feature 2: /note="T is a lgT3 nucleotide analog"
  misc_feature 2: /note="The nucleotide in position 2 and the nucleotide in position 1 are linked through a phosphodiester linkage"
  misc_feature 2: /note="The nucleotide in position 2 and the nucleotide in position 3 are linked through a phosphodiester linkage"
  misc_feature 3: /note="T is a lgT3 nucleotide analog"
  misc_feature 3: /note="The nucleotide in position 3 and the nucleotide in position 2 are linked through a phosphodiester linkage"
  misc_feature 3: /note="The nucleotide in position 3 and the nucleotide in position 4 are linked through a phosphodiester linkage"
  misc_feature 4: /note="U is a locked uracil (lU)"
  misc_feature 4: /note="The nucleotide in position 4 and the nucleotide in position 3 are linked through a phosphodiester linkage"
  misc_feature 4: /note="The nucleotide in position 4 and the nucleotide in position 5 are linked through a phosphodiester linkage"
  misc_feature 5: /note="A is a locked adenine (lA)"
  misc_feature 5: /note="The nucleotide in position 5 and the nucleotide in position 4 are linked through a phosphodiester linkage"
  misc_feature 5: /note="The nucleotide in position 5 and the nucleotide in position 6 are linked through a phosphodiester linkage"
  misc_feature 6: /note="U is a 2'-O-Methyluridine (mU)"
  misc_feature 6: /note="The nucleotide in position 6 and the nucleotide in position 5 are linked through a phosphodiester linkage"
  misc_feature 6: /note="The nucleotide in position 6 and the nucleotide in position 7 are linked through a phosphodiester linkage"
  misc_feature 7: /note="G is a 2'-O-Methylguanosine (mG)"
  misc_feature 7: /note="The nucleotide in position 7 and the nucleotide in position 6 are linked through a phosphodiester linkage"
  misc_feature 7: /note="The nucleotide in position 7 and the nucleotide in position 8 are linked through a phosphodiester linkage"
  misc_feature 8: /note="G is a 2'-fluoro-guanosine (fG)"
  misc_feature 8: /note="The nucleotide in position 8 and the nucleotide in position 7 are linked through a phosphodiester linkage"
  misc_feature 8: /note="The nucleotide in position 8 and the nucleotide in position 9 are linked through a phosphodiester linkage"
  misc_feature 9: /note="U is a 2'-O-Methyluridine (mU)"
  misc_feature 9: /note="The nucleotide in position 9 and the nucleotide in position 8 are linked through a phosphodiester linkage"
  misc_feature 9: /note="The nucleotide in position 9 and the nucleotide in position 10 are linked through a phosphodiester linkage"
  misc_feature 10: /note="G is a 2'-fluoro-guanosine (fG)"
  misc_feature 10: /note="The nucleotide in position 10 and the nucleotide in position 9 are linked through a phosphodiester linkage"
  misc_feature 10: /note="The nucleotide in position 10 and the nucleotide in position 11 are linked through a phosphodiester linkage"
  misc_feature 11: /note="A is a 2'-fluoro-adenosine (fA)"
  misc_feature 11: /note="The nucleotide in position 11 and the nucleotide in position 10 are linked through a phosphodiester linkage"
  misc_feature 11: /note="The nucleotide in position 11 and the nucleotide in position 12 are linked through a phosphodiester linkage"
  misc_feature 12: /note="C is a 2'-fluoro-cytidine (fC)"
  misc_feature 12: /note="The nucleotide in position 12 and the nucleotide in position 11 are linked through a phosphodiester linkage"
  misc_feature 12: /note="The nucleotide in position 12 and the nucleotide in position 13 are linked through a phosphodiester linkage"
  misc_feature 13: /note="U is a 2'-O-Methyluridine (mU)"
  misc_feature 13: /note="The nucleotide in position 13 and the nucleotide in position 12 are linked through a phosphodiester linkage"
  misc_feature 13: /note="The nucleotide in position 13 and the nucleotide in position 14 are linked through a phosphodiester linkage"
  misc_feature 14: /note="U is a 2'-O-Methyluridine (mU)"
  misc_feature 14: /note="The nucleotide in position 14 and the nucleotide in position 13 are linked through a phosphodiester linkage"
  misc_feature 14: /note="The nucleotide in position 14 and the nucleotide in position 15 are linked through a phosphodiester linkage"
  misc_feature 15: /note="U is a 2'-O-Methyluridine (mU)"
  misc_feature 15: /note="The nucleotide in position 15 and the nucleotide in position 14 are linked through a phosphodiester linkage"
  misc_feature 15: /note="The nucleotide in position 15 and the nucleotide in position 16 are linked through a phosphodiester linkage"
  misc_feature 16: /note="U is a 2'-O-Methyluridine (mU)"
  misc_feature 16: /note="The nucleotide in position 16 and the nucleotide in position 15 are linked through a phosphodiester linkage"
  misc_feature 16: /note="The nucleotide in position 16 and the nucleotide in position 17 are linked through a phosphodiester linkage"
  misc_feature 17: /note="U is a 2'-O-Methyluridine (mU)"
  misc_feature 17: /note="The nucleotide in position 17 and the nucleotide in position 16 are linked through a phosphodiester linkage"
  misc_feature 17: /note="The nucleotide in position 17 and the nucleotide in position 18 are linked through a phosphodiester linkage"
  misc_feature 18: /note="A is a 2'-O-Methyladenosine (mA)"
  misc_feature 18: /note="The nucleotide in position 18 and the nucleotide in position 17 are linked through a phosphodiester linkage"
  misc_feature 18: /note="The nucleotide in position 18 and the nucleotide in position 19 are linked through a phosphodiester linkage"
  misc_feature 19: /note="A is a 2'-O-Methyladenosine (mA)"
  misc_feature 19: /note="The nucleotide in position 19 and the nucleotide in position 18 are linked through a phosphodiester linkage"
  misc_feature 19: /note="The nucleotide in position 19 and the nucleotide in position 20 are linked through a phosphodiester linkage"
  misc_feature 20: /note="A is a 2'-O-Methyladenosine (mA)"
  misc_feature 20: /note="The nucleotide in position 20 and the nucleotide in position 19 are linked through a phosphodiester linkage"
  misc_feature 20: /note="The nucleotide in position 20 and the nucleotide in position 21 are linked through a phosphodiester linkage"
  misc_feature 21: /note="T is a LT4 nucleotide analog"
  misc_feature 21: /note="The nucleotide in position 21 and the nucleotide in position 20 are linked through a phosphodiester linkage"
  misc_feature 21: /note="The nucleotide in position 21 and the nucleotide in position 22 are linked through a phosphodiester linkage"
  misc_feature 22: /note="T is a LT4 nucleotide analog"
  misc_feature 22: /note="The nucleotide in position 22 and the nucleotide in position 21 are linked through a phosphodiester linkage"
tttuauggugacuuuuuaaatt

SEQ ID NO: 584 - RNA, 22 nt, Artificial Sequence
  ss C027.001#34 to #38
  misc_feature 1: /note="T is a lgT3 nucleotide analog"
  misc_feature 1: /note="The nucleotide in position 1 and the nucleotide in position 2 are linked through a phosphorothioate linkage"
  misc_feature 2: /note="T is a lgT3 nucleotide analog"
  misc_feature 2: /note="The nucleotide in position 2 and the nucleotide in position 1 are linked through a phosphorothioate linkage"
  misc_feature 2: /note="The nucleotide in position 2 and the nucleotide in position 3 are linked through a phosphorothioate linkage"
  misc_feature 3: /note="T is a lgT3 nucleotide analog"
  misc_feature 3: /note="The nucleotide in position 3 and the nucleotide in position 2 are linked through a phosphorothioate linkage"
  misc_feature 3: /note="The nucleotide in position 3 and the nucleotide in position 4 are linked through a phosphodiester linkage"
  misc_feature 4: /note="U is a locked uracil (lU)"
  misc_feature 4: /note="The nucleotide in position 4 and the nucleotide in position 3 are linked through a phosphodiester linkage"
  misc_feature 4: /note="The nucleotide in position 4 and the nucleotide in position 5 are linked through a phosphodiester linkage"
  misc_feature 5: /note="A is a locked adenine (lA)"
  misc_feature 5: /note="The nucleotide in position 5 and the nucleotide in position 4 are linked through a phosphodiester linkage"
  misc_feature 5: /note="The nucleotide in position 5 and the nucleotide in position 6 are linked through a phosphodiester linkage"
  misc_feature 6: /note="U is a 2'-O-Methyluridine (mU)"
  misc_feature 6: /note="The nucleotide in position 6 and the nucleotide in position 5 are linked through a phosphodiester linkage"
  misc_feature 6: /note="The nucleotide in position 6 and the nucleotide in position 7 are linked through a phosphodiester linkage"
  misc_feature 7: /note="G is a 2'-O-Methylguanosine (mG)"
  misc_feature 7: /note="The nucleotide in position 7 and the nucleotide in position 6 are linked through a phosphodiester linkage"
  misc_feature 7: /note="The nucleotide in position 7 and the nucleotide in position 8 are linked through a phosphodiester linkage"
  misc_feature 8: /note="G is a 2'-fluoro-guanosine (fG)"
  misc_feature 8: /note="The nucleotide in position 8 and the nucleotide in position 7 are linked through a phosphodiester linkage"
  misc_feature 8: /note="The nucleotide in position 8 and the nucleotide in position 9 are linked through a phosphodiester linkage"
  misc_feature 9: /note="U is a 2'-O-Methyluridine (mU)"
  misc_feature 9: /note="The nucleotide in position 9 and the nucleotide in position 8 are linked through a phosphodiester linkage"
  misc_feature 9: /note="The nucleotide in position 9 and the nucleotide in position 10 are linked through a phosphodiester linkage"
  misc_feature 10: /note="G is a 2'-fluoro-guanosine (fG)"
  misc_feature 10: /note="The nucleotide in position 10 and the nucleotide in position 9 are linked through a phosphodiester linkage"
  misc_feature 10: /note="The nucleotide in position 10 and the nucleotide in position 11 are linked through a phosphodiester linkage"
  misc_feature 11: /note="A is a 2'-fluoro-adenosine (fA)"
  misc_feature 11: /note="The nucleotide in position 11 and the nucleotide in position 10 are linked through a phosphodiester linkage"
  misc_feature 11: /note="The nucleotide in position 11 and the nucleotide in position 12 are linked through a phosphodiester linkage"
  misc_feature 12: /note="C is a 2'-fluoro-cytidine (fC)"
  misc_feature 12: /note="The nucleotide in position 12 and the nucleotide in position 11 are linked through a phosphodiester linkage"
  misc_feature 12: /note="The nucleotide in position 12 and the nucleotide in position 13 are linked through a phosphodiester linkage"
  misc_feature 13: /note="U is a 2'-O-Methyluridine (mU)"
  misc_feature 13: /note="The nucleotide in position 13 and the nucleotide in position 12 are linked through a phosphodiester linkage"
  misc_feature 13: /note="The nucleotide in position 13 and the nucleotide in position 14 are linked through a phosphodiester linkage"
  misc_feature 14: /note="U is a 2'-O-Methyluridine (mU)"
  misc_feature 14: /note="The nucleotide in position 14 and the nucleotide in position 13 are linked through a phosphodiester linkage"
  misc_feature 14: /note="The nucleotide in position 14 and the nucleotide in position 15 are linked through a phosphodiester linkage"
  misc_feature 15: /note="U is a 2'-O-Methyluridine (mU)"
  misc_feature 15: /note="The nucleotide in position 15 and the nucleotide in position 14 are linked through a phosphodiester linkage"
  misc_feature 15: /note="The nucleotide in position 15 and the nucleotide in position 16 are linked through a phosphodiester linkage"
  misc_feature 16: /note="U is a 2'-O-Methyluridine (mU)"
  misc_feature 16: /note="The nucleotide in position 16 and the nucleotide in position 15 are linked through a phosphodiester linkage"
  misc_feature 16: /note="The nucleotide in position 16 and the nucleotide in position 17 are linked through a phosphodiester linkage"
  misc_feature 17: /note="U is a 2'-O-Methyluridine (mU)"
  misc_feature 17: /note="The nucleotide in position 17 and the nucleotide in position 16 are linked through a phosphodiester linkage"
  misc_feature 17: /note="The nucleotide in position 17 and the nucleotide in position 18 are linked through a phosphodiester linkage"
  misc_feature 18: /note="A is a 2'-O-Methyladenosine (mA)"
  misc_feature 18: /note="The nucleotide in position 18 and the nucleotide in position 17 are linked through a phosphodiester linkage"
  misc_feature 18: /note="The nucleotide in position 18 and the nucleotide in position 19 are linked through a phosphodiester linkage"
  misc_feature 19: /note="A is a 2'-O-Methyladenosine (mA)"
  misc_feature 19: /note="The nucleotide in position 19 and the nucleotide in position 18 are linked through a phosphodiester linkage"
  misc_feature 19: /note="The nucleotide in position 19 and the nucleotide in position 20 are linked through a phosphodiester linkage"
  misc_feature 20: /note="A is a 2'-O-Methyladenosine (mA)"
  misc_feature 20: /note="The nucleotide in position 20 and the nucleotide in position 19 are linked through a phosphodiester linkage"
  misc_feature 20: /note="The nucleotide in position 20 and the nucleotide in position 21 are linked through a phosphorothioate linkage"
  misc_feature 21: /note="T is a LT4 nucleotide analog"
  misc_feature 21: /note="The nucleotide in position 21 and the nucleotide in position 20 are linked through a phosphorothioate linkage"
  misc_feature 21: /note="The nucleotide in position 21 and the nucleotide in position 22 are linked through a phosphorothioate linkage"
  misc_feature 22: /note="T is a LT4 nucleotide analog"
  misc_feature 22: /note="The nucleotide in position 22 and the nucleotide in position 21 are linked through a phosphorothioate linkage"
tttuauggugacuuuuuaaatt

SEQ ID NO: 585 - RNA, 24 nt, Artificial Sequence
  ss C027.001#39 to #47
  misc_feature 1: /note="T is a lgT3 nucleotide analog"
  misc_feature 1: /note="The nucleotide in position 1 and the nucleotide in position 2 are linked through a phosphodiester linkage"
  misc_feature 2: /note="T is a lgT3 nucleotide analog"
  misc_feature 2: /note="The nucleotide in position 2 and the nucleotide in position 1 are linked through a phosphodiester linkage"
  misc_feature 2: /note="The nucleotide in position 2 and the nucleotide in position 3 are linked through a phosphodiester linkage"
  misc_feature 3: /note="T is a lgT3 nucleotide analog"
  misc_feature 3: /note="The nucleotide in position 3 and the nucleotide in position 2 are linked through a phosphodiester linkage"
  misc_feature 3: /note="The nucleotide in position 3 and the nucleotide in position 4 are linked through a phosphodiester linkage"
  misc_feature 4: /note="U is a 2'-O-Methyluridine (mU)"
  misc_feature 4: /note="The nucleotide in position 4 and the nucleotide in position 3 are linked through a phosphodiester linkage"
  misc_feature 4: /note="The nucleotide in position 4 and the nucleotide in position 5 are linked through a phosphodiester linkage"
  misc_feature 5: /note="A is a 2'-O-Methyladenosine (mA)"
  misc_feature 5: /note="The nucleotide in position 5 and the nucleotide in position 4 are linked through a phosphodiester linkage"
  misc_feature 5: /note="The nucleotide in position 5 and the nucleotide in position 6 are linked through a phosphodiester linkage"
  misc_feature 6: /note="U is a 2'-O-Methyluridine (mU)"
  misc_feature 6: /note="The nucleotide in position 6 and the nucleotide in position 5 are linked through a phosphodiester linkage"
  misc_feature 6: /note="The nucleotide in position 6 and the nucleotide in position 7 are linked through a phosphodiester linkage"
  misc_feature 7: /note="G is a 2'-O-Methylguanosine (mG)"
  misc_feature 7: /note="The nucleotide in position 7 and the nucleotide in position 6 are linked through a phosphodiester linkage"
  misc_feature 7: /note="The nucleotide in position 7 and the nucleotide in position 8 are linked through a phosphodiester linkage"
  misc_feature 8: /note="G is a 2'-fluoro-guanosine (fG)"
  misc_feature 8: /note="The nucleotide in position 8 and the nucleotide in position 7 are linked through a phosphodiester linkage"
  misc_feature 8: /note="The nucleotide in position 8 and the nucleotide in position 9 are linked through a phosphodiester linkage"
  misc_feature 9: /note="U is a 2'-O-Methyluridine (mU)"
  misc_feature 9: /note="The nucleotide in position 9 and the nucleotide in position 8 are linked through a phosphodiester linkage"
  misc_feature 9: /note="The nucleotide in position 9 and the nucleotide in position 10 are linked through a phosphodiester linkage"
  misc_feature 10: /note="G is a 2'-fluoro-guanosine (fG)"
  misc_feature 10: /note="The nucleotide in position 10 and the nucleotide in position 9 are linked through a phosphodiester linkage"
  misc_feature 10: /note="The nucleotide in position 10 and the nucleotide in position 11 are linked through a phosphodiester linkage"
  misc_feature 11: /note="A is a 2'-fluoro-adenosine (fA)"
  misc_feature 11: /note="The nucleotide in position 11 and the nucleotide in position 10 are linked through a phosphodiester linkage"
  misc_feature 11: /note="The nucleotide in position 11 and the nucleotide in position 12 are linked through a phosphodiester linkage"
  misc_feature 12: /note="C is a 2'-fluoro-cytidine (fC)"
  misc_feature 12: /note="The nucleotide in position 12 and the nucleotide in position 11 are linked through a phosphodiester linkage"
  misc_feature 12: /note="The nucleotide in position 12 and the nucleotide in position 13 are linked through a phosphodiester linkage"
  misc_feature 13: /note="U is a 2'-O-Methyluridine (mU)"
  misc_feature 13: /note="The nucleotide in position 13 and the nucleotide in position 12 are linked through a phosphodiester linkage"
  misc_feature 13: /note="The nucleotide in position 13 and the nucleotide in position 14 are linked through a phosphodiester linkage"
  misc_feature 14: /note="U is a 2'-O-Methyluridine (mU)"
  misc_feature 14: /note="The nucleotide in position 14 and the nucleotide in position 13 are linked through a phosphodiester linkage"
  misc_feature 14: /note="The nucleotide in position 14 and the nucleotide in position 15 are linked through a phosphodiester linkage"
  misc_feature 15: /note="U is a 2'-O-Methyluridine (mU)"
  misc_feature 15: /note="The nucleotide in position 15 and the nucleotide in position 14 are linked through a phosphodiester linkage"
  misc_feature 15: /note="The nucleotide in position 15 and the nucleotide in position 16 are linked through a phosphodiester linkage"
  misc_feature 16: /note="U is a 2'-O-Methyluridine (mU)"
  misc_feature 16: /note="The nucleotide in position 16 and the nucleotide in position 15 are linked through a phosphodiester linkage"
  misc_feature 16: /note="The nucleotide in position 16 and the nucleotide in position 17 are linked through a phosphodiester linkage"
  misc_feature 17: /note="U is a 2'-O-Methyluridine (mU)"
  misc_feature 17: /note="The nucleotide in position 17 and the nucleotide in position 16 are linked through a phosphodiester linkage"
  misc_feature 17: /note="The nucleotide in position 17 and the nucleotide in position 18 are linked through a phosphodiester linkage"
  misc_feature 18: /note="A is a 2'-O-Methyladenosine (mA)"
  misc_feature 18: /note="The nucleotide in position 18 and the nucleotide in position 17 are linked through a phosphodiester linkage"
  misc_feature 18: /note="The nucleotide in position 18 and the nucleotide in position 19 are linked through a phosphodiester linkage"
  misc_feature 19: /note="A is a 2'-O-Methyladenosine (mA)"
  misc_feature 19: /note="The nucleotide in position 19 and the nucleotide in position 18 are linked through a phosphodiester linkage"
  misc_feature 19: /note="The nucleotide in position 19 and the nucleotide in position 20 are linked through a phosphodiester linkage"
  misc_feature 20: /note="A is a 2'-O-Methyladenosine (mA)"
  misc_feature 20: /note="The nucleotide in position 20 and the nucleotide in position 19 are linked through a phosphodiester linkage"
  misc_feature 20: /note="The nucleotide in position 20 and the nucleotide in position 21 are linked through a phosphodiester linkage"
  misc_feature 21: /note="A is a 2'-O-Methyladenosine (mA)"
  misc_feature 21: /note="The nucleotide in position 21 and the nucleotide in position 20 are linked through a phosphodiester linkage"
  misc_feature 21: /note="The nucleotide in position 21 and the nucleotide in position 22 are linked through a phosphodiester linkage"
  misc_feature 22: /note="U is a 2'-O-Methyluridine (mU)"
  misc_feature 22: /note="The nucleotide in position 22 and the nucleotide in position 21 are linked through a phosphodiester linkage"
  misc_feature 22: /note="The nucleotide in position 22 and the nucleotide in position 23 are linked through a phosphodiester linkage"
  misc_feature 23: /note="T is a LT4 nucleotide analog"
  misc_feature 23: /note="The nucleotide in position 23 and the nucleotide in position 22 are linked through a phosphodiester linkage"
  misc_feature 23: /note="The nucleotide in position 23 and the nucleotide in position 24 are linked through a phosphodiester linkage"
  misc_feature 24: /note="T is a LT4 nucleotide analog"
  misc_feature 24: /note="The nucleotide in position 24 and the nucleotide in position 23 are linked through a phosphodiester linkage"
tttuauggugacuuuuuaaaautt

SEQ ID NO: 586 - RNA, 24 nt, Artificial Sequence
  ss C027.001#48 to #56
  misc_feature 1: /note="T is a lgT3 nucleotide analog"
  misc_feature 1: /note="The nucleotide in position 1 and the nucleotide in position 2 are linked through a phosphorothioate linkage"
  misc_feature 2: /note="T is a lgT3 nucleotide analog"
  misc_feature 2: /note="The nucleotide in position 2 and the nucleotide in position 1 are linked through a phosphorothioate linkage"
  misc_feature 2: /note="The nucleotide in position 2 and the nucleotide in position 3 are linked through a phosphorothioate linkage"
  misc_feature 3: /note="T is a lgT3 nucleotide analog"
  misc_feature 3: /note="The nucleotide in position 3 and the nucleotide in position 2 are linked through a phosphorothioate linkage"
  misc_feature 3: /note="The nucleotide in position 3 and the nucleotide in position 4 are linked through a phosphodiester linkage"
  misc_feature 4: /note="U is a 2'-O-Methyluridine (mU)"
  misc_feature 4: /note="The nucleotide in position 4 and the nucleotide in position 3 are linked through a phosphodiester linkage"
  misc_feature 4: /note="The nucleotide in position 4 and the nucleotide in position 5 are linked through a phosphodiester linkage"
  misc_feature 5: /note="A is a 2'-O-Methyladenosine (mA)"
  misc_feature 5: /note="The nucleotide in position 5 and the nucleotide in position 4 are linked through a phosphodiester linkage"
  misc_feature 5: /note="The nucleotide in position 5 and the nucleotide in position 6 are linked through a phosphodiester linkage"
  misc_feature 6: /note="U is a 2'-O-Methyluridine (mU)"
  misc_feature 6: /note="The nucleotide in position 6 and the nucleotide in position 5 are linked through a phosphodiester linkage"
  misc_feature 6: /note="The nucleotide in position 6 and the nucleotide in position 7 are linked through a phosphodiester linkage"
  misc_feature 7: /note="G is a 2'-O-Methylguanosine (mG)"
  misc_feature 7: /note="The nucleotide in position 7 and the nucleotide in position 6 are linked through a phosphodiester linkage"
  misc_feature 7: /note="The nucleotide in position 7 and the nucleotide in position 8 are linked through a phosphodiester linkage"
  misc_feature 8: /note="G is a 2'-fluoro-guanosine (fG)"
  misc_feature 8: /note="The nucleotide in position 8 and the nucleotide in position 7 are linked through a phosphodiester linkage"
  misc_feature 8: /note="The nucleotide in position 8 and the nucleotide in position 9 are linked through a phosphodiester linkage"
  misc_feature 9: /note="U is a 2'-O-Methyluridine (mU)"
  misc_feature 9: /note="The nucleotide in position 9 and the nucleotide in position 8 are linked through a phosphodiester linkage"
  misc_feature 9: /note="The nucleotide in position 9 and the nucleotide in position 10 are linked through a phosphodiester linkage"
  misc_feature 10: /note="G is a 2'-fluoro-guanosine (fG)"
  misc_feature 10: /note="The nucleotide in position 10 and the nucleotide in position 9 are linked through a phosphodiester linkage"
  misc_feature 10: /note="The nucleotide in position 10 and the nucleotide in position 11 are linked through a phosphodiester linkage"
  misc_feature 11: /note="A is a 2'-fluoro-adenosine (fA)"
  misc_feature 11: /note="The nucleotide in position 11 and the nucleotide in position 10 are linked through a phosphodiester linkage"
  misc_feature 11: /note="The nucleotide in position 11 and the nucleotide in position 12 are linked through a phosphodiester linkage"
  misc_feature 12: /note="C is a 2'-fluoro-cytidine (fC)"
  misc_feature 12: /note="The nucleotide in position 12 and the nucleotide in position 11 are linked through a phosphodiester linkage"
  misc_feature 12: /note="The nucleotide in position 12 and the nucleotide in position 13 are linked through a phosphodiester linkage"
  misc_feature 13: /note="U is a 2'-O-Methyluridine (mU)"
  misc_feature 13: /note="The nucleotide in position 13 and the nucleotide in position 12 are linked through a phosphodiester linkage"
  misc_feature 13: /note="The nucleotide in position 13 and the nucleotide in position 14 are linked through a phosphodiester linkage"
  misc_feature 14: /note="U is a 2'-O-Methyluridine (mU)"
  misc_feature 14: /note="The nucleotide in position 14 and the nucleotide in position 13 are linked through a phosphodiester linkage"
  misc_feature 14: /note="The nucleotide in position 14 and the nucleotide in position 15 are linked through a phosphodiester linkage"
  misc_feature 15: /note="U is a 2'-O-Methyluridine (mU)"
  misc_feature 15: /note="The nucleotide in position 15 and the nucleotide in position 14 are linked through a phosphodiester linkage"
  misc_feature 15: /note="The nucleotide in position 15 and the nucleotide in position 16 are linked through a phosphodiester linkage"
  misc_feature 16: /note="U is a 2'-O-Methyluridine (mU)"
  misc_feature 16: /note="The nucleotide in position 16 and the nucleotide in position 15 are linked through a phosphodiester linkage"
  misc_feature 16: /note="The nucleotide in position 16 and the nucleotide in position 17 are linked through a phosphodiester linkage"
  misc_feature 17: /note="U is a 2'-O-Methyluridine (mU)"
  misc_feature 17: /note="The nucleotide in position 17 and the nucleotide in position 16 are linked through a phosphodiester linkage"
  misc_feature 17: /note="The nucleotide in position 17 and the nucleotide in position 18 are linked through a phosphodiester linkage"
  misc_feature 18: /note="A is a 2'-O-Methyladenosine (mA)"
  misc_feature 18: /note="The nucleotide in position 18 and the nucleotide in position 17 are linked through a phosphodiester linkage"
  misc_feature 18: /note="The nucleotide in position 18 and the nucleotide in position 19 are linked through a phosphodiester linkage"
  misc_feature 19: /note="A is a 2'-O-Methyladenosine (mA)"
  misc_feature 19: /note="The nucleotide in position 19 and the nucleotide in position 18 are linked through a phosphodiester linkage"
  misc_feature 19: /note="The nucleotide in position 19 and the nucleotide in position 20 are linked through a phosphodiester linkage"
  misc_feature 20: /note="A is a 2'-O-Methyladenosine (mA)"
  misc_feature 20: /note="The nucleotide in position 20 and the nucleotide in position 19 are linked through a phosphodiester linkage"
  misc_feature 20: /note="The nucleotide in position 20 and the nucleotide in position 21 are linked through a phosphodiester linkage"
  misc_feature 21: /note="A is a 2'-O-Methyladenosine (mA)"
  misc_feature 21: /note="The nucleotide in position 21 and the nucleotide in position 20 are linked through a phosphodiester linkage"
  misc_feature 21: /note="The nucleotide in position 21 and the nucleotide in position 22 are linked through a phosphodiester linkage"
  misc_feature 22: /note="U is a 2'-O-Methyluridine (mU)"
  misc_feature 22: /note="The nucleotide in position 22 and the nucleotide in position 21 are linked through a phosphodiester linkage"
  misc_feature 22: /note="The nucleotide in position 22 and the nucleotide in position 23 are linked through a phosphorothioate linkage"
  misc_feature 23: /note="T is a LT4 nucleotide analog"
  misc_feature 23: /note="The nucleotide in position 23 and the nucleotide in position 22 are linked through a phosphorothioate linkage"
  misc_feature 23: /note="The nucleotide in position 23 and the nucleotide in position 24 are linked through a phosphorothioate linkage"
  misc_feature 24: /note="T is a LT4 nucleotide analog"
  misc_feature 24: /note="The nucleotide in position 24 and the nucleotide in position 23 are linked through a phosphorothioate linkage"
tttuauggugacuuuuuaaaautt

SEQ ID NO: 587 - RNA, 24 nt, Artificial Sequence
  ss C027.001#57 to #61
  misc_feature 1: /note="T is a lgT3 nucleotide analog"
  misc_feature 1: /note="The nucleotide in position 1 and the nucleotide in position 2 are linked through a phosphodiester linkage"
  misc_feature 2: /note="T is a lgT3 nucleotide analog"
  misc_feature 2: /note="The nucleotide in position 2 and the nucleotide in position 1 are linked through a phosphodiester linkage"
  misc_feature 2: /note="The nucleotide in position 2 and the nucleotide in position 3 are linked through a phosphodiester linkage"
  misc_feature 3: /note="T is a lgT3 nucleotide analog"
  misc_feature 3: /note="The nucleotide in position 3 and the nucleotide in position 2 are linked through a phosphodiester linkage"
  misc_feature 3: /note="The nucleotide in position 3 and the nucleotide in position 4 are linked through a phosphodiester linkage"
  misc_feature 4: /note="U is a locked uracil (lU)"
  misc_feature 4: /note="The nucleotide in position 4 and the nucleotide in position 3 are linked through a phosphodiester linkage"
  misc_feature 4: /note="The nucleotide in position 4 and the nucleotide in position 5 are linked through a phosphodiester linkage"
  misc_feature 5: /note="A is a locked adenine (lA)"
  misc_feature 5: /note="The nucleotide in position 5 and the nucleotide in position 4 are linked through a phosphodiester linkage"
  misc_feature 5: /note="The nucleotide in position 5 and the nucleotide in position 6 are linked through a phosphodiester linkage"
  misc_feature 6: /note="U is a 2'-O-Methyluridine (mU)"
  misc_feature 6: /note="The nucleotide in position 6 and the nucleotide in position 5 are linked through a phosphodiester linkage"
  misc_feature 6: /note="The nucleotide in position 6 and the nucleotide in position 7 are linked through a phosphodiester linkage"
  misc_feature 7: /note="G is a 2'-O-Methylguanosine (mG)"
  misc_feature 7: /note="The nucleotide in position 7 and the nucleotide in position 6 are linked through a phosphodiester linkage"
  misc_feature 7: /note="The nucleotide in position 7 and the nucleotide in position 8 are linked through a phosphodiester linkage"
  misc_feature 8: /note="G is a 2'-fluoro-guanosine (fG)"
  misc_feature 8: /note="The nucleotide in position 8 and the nucleotide in position 7 are linked through a phosphodiester linkage"
  misc_feature 8: /note="The nucleotide in position 8 and the nucleotide in position 9 are linked through a phosphodiester linkage"
  misc_feature 9: /note="U is a 2'-O-Methyluridine (mU)"
  misc_feature 9: /note="The nucleotide in position 9 and the nucleotide in position 8 are linked through a phosphodiester linkage"
  misc_feature 9: /note="The nucleotide in position 9 and the nucleotide in position 10 are linked through a phosphodiester linkage"
  misc_feature 10: /note="G is a 2'-fluoro-guanosine (fG)"
  misc_feature 10: /note="The nucleotide in position 10 and the nucleotide in position 9 are linked through a phosphodiester linkage"
  misc_feature 10: /note="The nucleotide in position 10 and the nucleotide in position 11 are linked through a phosphodiester linkage"
  misc_feature 11: /note="A is a 2'-fluoro-adenosine (fA)"
  misc_feature 11: /note="The nucleotide in position 11 and the nucleotide in position 10 are linked through a phosphodiester linkage"
  misc_feature 11: /note="The nucleotide in position 11 and the nucleotide in position 12 are linked through a phosphodiester linkage"
  misc_feature 12: /note="C is a 2'-fluoro-cytidine (fC)"
  misc_feature 12: /note="The nucleotide in position 12 and the nucleotide in position 11 are linked through a phosphodiester linkage"
  misc_feature 12: /note="The nucleotide in position 12 and the nucleotide in position 13 are linked through a phosphodiester linkage"
  misc_feature 13: /note="U is a 2'-O-Methyluridine (mU)"
  misc_feature 13: /note="The nucleotide in position 13 and the nucleotide in position 12 are linked through a phosphodiester linkage"
  misc_feature 13: /note="The nucleotide in position 13 and the nucleotide in position 14 are linked through a phosphodiester linkage"
  misc_feature 14: /note="U is a 2'-O-Methyluridine (mU)"
  misc_feature 14: /note="The nucleotide in position 14 and the nucleotide in position 13 are linked through a phosphodiester linkage"
  misc_feature 14: /note="The nucleotide in position 14 and the nucleotide in position 15 are linked through a phosphodiester linkage"
  misc_feature 15: /note="U is a 2'-O-Methyluridine (mU)"
  misc_feature 15: /note="The nucleotide in position 15 and the nucleotide in position 14 are linked through a phosphodiester linkage"
  misc_feature 15: /note="The nucleotide in position 15 and the nucleotide in position 16 are linked through a phosphodiester linkage"
  misc_feature 16: /note="U is a 2'-O-Methyluridine (mU)"
  misc_feature 16: /note="The nucleotide in position 16 and the nucleotide in position 15 are linked through a phosphodiester linkage"
  misc_feature 16: /note="The nucleotide in position 16 and the nucleotide in position 17 are linked through a phosphodiester linkage"
  misc_feature 17: /note="U is a 2'-O-Methyluridine (mU)"
  misc_feature 17: /note="The nucleotide in position 17 and the nucleotide in position 16 are linked through a phosphodiester linkage"
  misc_feature 17: /note="The nucleotide in position 17 and the nucleotide in position 18 are linked through a phosphodiester linkage"
  misc_feature 18: /note="A is a 2'-O-Methyladenosine (mA)"
  misc_feature 18: /note="The nucleotide in position 18 and the nucleotide in position 17 are linked through a phosphodiester linkage"
  misc_feature 18: /note="The nucleotide in position 18 and the nucleotide in position 19 are linked through a phosphodiester linkage"
  misc_feature 19: /note="A is a 2'-O-Methyladenosine (mA)"
  misc_feature 19: /note="The nucleotide in position 19 and the nucleotide in position 18 are linked through a phosphodiester linkage"
  misc_feature 19: /note="The nucleotide in position 19 and the nucleotide in position 20 are linked through a phosphodiester linkage"
  misc_feature 20: /note="A is a 2'-O-Methyladenosine (mA)"
  misc_feature 20: /note="The nucleotide in position 20 and the nucleotide in position 19 are linked through a phosphodiester linkage"
  misc_feature 20: /note="The nucleotide in position 20 and the nucleotide in position 21 are linked through a phosphodiester linkage"
  misc_feature 21: /note="A is a 2'-O-Methyladenosine (mA)"
  misc_feature 21: /note="The nucleotide in position 21 and the nucleotide in position 20 are linked through a phosphodiester linkage"
  misc_feature 21: /note="The nucleotide in position 21 and the nucleotide in position 22 are linked through a phosphodiester linkage"
  misc_feature 22: /note="U is a 2'-O-Methyluridine (mU)"
  misc_feature 22: /note="The nucleotide in position 22 and the nucleotide in position 21 are linked through a phosphodiester linkage"
  misc_feature 22: /note="The nucleotide in position 22 and the nucleotide in position 23 are linked through a phosphodiester linkage"
  misc_feature 23: /note="T is a LT4 nucleotide analog"
  misc_feature 23: /note="The nucleotide in position 23 and the nucleotide in position 22 are linked through a phosphodiester linkage"
  misc_feature 23: /note="The nucleotide in position 23 and the nucleotide in position 24 are linked through a phosphodiester linkage"
  misc_feature 24: /note="T is a LT4 nucleotide analog"
  misc_feature 24: /note="The nucleotide in position 24 and the nucleotide in position 23 are linked through a phosphodiester linkage"
tttuauggugacuuuuuaaaautt

SEQ ID NO: 588 - RNA, 24 nt, Artificial Sequence
  ss C027.001#62 to #66
  misc_feature 1: /note="T is a lgT3 nucleotide analog"
  misc_feature 1: /note="The nucleotide in position 1 and the nucleotide in position 2 are linked through a phosphorothioate linkage"
  misc_feature 2: /note="T is a lgT3 nucleotide analog"
  misc_feature 2: /note="The nucleotide in position 2 and the nucleotide in position 1 are linked through a phosphorothioate linkage"
  misc_feature 2: /note="The nucleotide in position 2 and the nucleotide in position 3 are linked through a phosphorothioate linkage"
  misc_feature 3: /note="T is a lgT3 nucleotide analog"
  misc_feature 3: /note="The nucleotide in position 3 and the nucleotide in position 2 are linked through a phosphorothioate linkage"
  misc_feature 3: /note="The nucleotide in position 3 and the nucleotide in position 4 are linked through a phosphodiester linkage"
  misc_feature 4: /note="U is a locked uracil (lU)"
  misc_feature 4: /note="The nucleotide in position 4 and the nucleotide in position 3 are linked through a phosphodiester linkage"
  misc_feature 4: /note="The nucleotide in position 4 and the nucleotide in position 5 are linked through a phosphodiester linkage"
  misc_feature 5: /note="A is a locked adenine (lA)"
  misc_feature 5: /note="The nucleotide in position 5 and the nucleotide in position 4 are linked through a phosphodiester linkage"
  misc_feature 5: /note="The nucleotide in position 5 and the nucleotide in position 6 are linked through a phosphodiester linkage"
  misc_feature 6: /note="U is a 2'-O-Methyluridine (mU)"
  misc_feature 6: /note="The nucleotide in position 6 and the nucleotide in position 5 are linked through a phosphodiester linkage"
  misc_feature 6: /note="The nucleotide in position 6 and the nucleotide in position 7 are linked through a phosphodiester linkage"
  misc_feature 7: /note="G is a 2'-O-Methylguanosine (mG)"
  misc_feature 7: /note="The nucleotide in position 7 and the nucleotide in position 6 are linked through a phosphodiester linkage"
  misc_feature 7: /note="The nucleotide in position 7 and the nucleotide in position 8 are linked through a phosphodiester linkage"
  misc_feature 8: /note="G is a 2'-fluoro-guanosine (fG)"
  misc_feature 8: /note="The nucleotide in position 8 and the nucleotide in position 7 are linked through a phosphodiester linkage"
  misc_feature 8: /note="The nucleotide in position 8 and the nucleotide in position 9 are linked through a phosphodiester linkage"
  misc_feature 9: /note="U is a 2'-O-Methyluridine (mU)"
  misc_feature 9: /note="The nucleotide in position 9 and the nucleotide in position 8 are linked through a phosphodiester linkage"
  misc_feature 9: /note="The nucleotide in position 9 and the nucleotide in position 10 are linked through a phosphodiester linkage"
  misc_feature 10: /note="G is a 2'-fluoro-guanosine (fG)"
  misc_feature 10: /note="The nucleotide in position 10 and the nucleotide in position 9 are linked through a phosphodiester linkage"
  misc_feature 10: /note="The nucleotide in position 10 and the nucleotide in position 11 are linked through a phosphodiester linkage"
  misc_feature 11: /note="A is a 2'-fluoro-adenosine (fA)"
  misc_feature 11: /note="The nucleotide in position 11 and the nucleotide in position 10 are linked through a phosphodiester linkage"
  misc_feature 11: /note="The nucleotide in position 11 and the nucleotide in position 12 are linked through a phosphodiester linkage"
  misc_feature 12: /note="C is a 2'-fluoro-cytidine (fC)"
  misc_feature 12: /note="The nucleotide in position 12 and the nucleotide in position 11 are linked through a phosphodiester linkage"
  misc_feature 12: /note="The nucleotide in position 12 and the nucleotide in position 13 are linked through a phosphodiester linkage"
  misc_feature 13: /note="U is a 2'-O-Methyluridine (mU)"
  misc_feature 13: /note="The nucleotide in position 13 and the nucleotide in position 12 are linked through a phosphodiester linkage"
  misc_feature 13: /note="The nucleotide in position 13 and the nucleotide in position 14 are linked through a phosphodiester linkage"
  misc_feature 14: /note="U is a 2'-O-Methyluridine (mU)"
  misc_feature 14: /note="The nucleotide in position 14 and the nucleotide in position 13 are linked through a phosphodiester linkage"
  misc_feature 14: /note="The nucleotide in position 14 and the nucleotide in position 15 are linked through a phosphodiester linkage"
  misc_feature 15: /note="U is a 2'-O-Methyluridine (mU)"
  misc_feature 15: /note="The nucleotide in position 15 and the nucleotide in position 14 are linked through a phosphodiester linkage"
  misc_feature 15: /note="The nucleotide in position 15 and the nucleotide in position 16 are linked through a phosphodiester linkage"
  misc_feature 16: /note="U is a 2'-O-Methyluridine (mU)"
  misc_feature 16: /note="The nucleotide in position 16 and the nucleotide in position 15 are linked through a phosphodiester linkage"
  misc_feature 16: /note="The nucleotide in position 16 and the nucleotide in position 17 are linked through a phosphodiester linkage"
  misc_feature 17: /note="U is a 2'-O-Methyluridine (mU)"
  misc_feature 17: /note="The nucleotide in position 17 and the nucleotide in position 16 are linked through a phosphodiester linkage"
  misc_feature 17: /note="The nucleotide in position 17 and the nucleotide in position 18 are linked through a phosphodiester linkage"
  misc_feature 18: /note="A is a 2'-O-Methyladenosine (mA)"
  misc_feature 18: /note="The nucleotide in position 18 and the nucleotide in position 17 are linked through a phosphodiester linkage"
  misc_feature 18: /note="The nucleotide in position 18 and the nucleotide in position 19 are linked through a phosphodiester linkage"
  misc_feature 19: /note="A is a 2'-O-Methyladenosine (mA)"
  misc_feature 19: /note="The nucleotide in position 19 and the nucleotide in position 18 are linked through a phosphodiester linkage"
  misc_feature 19: /note="The nucleotide in position 19 and the nucleotide in position 20 are linked through a phosphodiester linkage"
  misc_feature 20: /note="A is a 2'-O-Methyladenosine (mA)"
  misc_feature 20: /note="The nucleotide in position 20 and the nucleotide in position 19 are linked through a phosphodiester linkage"
  misc_feature 20: /note="The nucleotide in position 20 and the nucleotide in position 21 are linked through a phosphodiester linkage"
  misc_feature 21: /note="A is a 2'-O-Methyladenosine (mA)"
  misc_feature 21: /note="The nucleotide in position 21 and the nucleotide in position 20 are linked through a phosphodiester linkage"
  misc_feature 21: /note="The nucleotide in position 21 and the nucleotide in position 22 are linked through a phosphodiester linkage"
  misc_feature 22: /note="U is a 2'-O-Methyluridine (mU)"
  misc_feature 22: /note="The nucleotide in position 22 and the nucleotide in position 21 are linked through a phosphodiester linkage"
  misc_feature 22: /note="The nucleotide in position 22 and the nucleotide in position 23 are linked through a phosphorothioate linkage"
  misc_feature 23: /note="T is a LT4 nucleotide analog"
  misc_feature 23: /note="The nucleotide in position 23 and the nucleotide in position 22 are linked through a phosphorothioate linkage"
  misc_feature 23: /note="The nucleotide in position 23 and the nucleotide in position 24 are linked through a phosphorothioate linkage"
  misc_feature 24: /note="T is a LT4 nucleotide analog"
  misc_feature 24: /note="The nucleotide in position 24 and the nucleotide in position 23 are linked through a phosphorothioate linkage"
tttuauggugacuuuuuaaaautt

SEQ ID NO: 589 - RNA, 21 nt, Artificial Sequence
  as C027.001
  misc_feature 1: /note="A is a 2'-fluoro-adenosine (fA)"
  misc_feature 1: /note="The nucleotide in position 1 and the nucleotide in position 2 are linked through a phosphorothioate linkage"
  misc_feature 2: /note="U is a 2'-fluoro-uridine (fU)"
  misc_feature 2: /note="The nucleotide in position 2 and the nucleotide in position 1 are linked through a phosphorothioate linkage"
  misc_feature 2: /note="The nucleotide in position 2 and the nucleotide in position 3 are linked through a phosphorothioate linkage"
  misc_feature 3: /note="U is a 2'-O-Methyluridine (mU)"
  misc_feature 3: /note="The nucleotide in position 3 and the nucleotide in position 2 are linked through a phosphorothioate linkage"
  misc_feature 3: /note="The nucleotide in position 3 and the nucleotide in position 4 are linked through a phosphodiester linkage"
  misc_feature 4: /note="U is a 2'-fluoro-uridine (fU)"
  misc_feature 4: /note="The nucleotide in position 4 and the nucleotide in position 3 are linked through a phosphodiester linkage"
  misc_feature 4: /note="The nucleotide in position 4 and the nucleotide in position 5 are linked through a phosphodiester linkage"
  misc_feature 5: /note="U is a 2'-O-Methyluridine (mU)"
  misc_feature 5: /note="The nucleotide in position 5 and the nucleotide in position 4 are linked through a phosphodiester linkage"
  misc_feature 5: /note="The nucleotide in position 5 and the nucleotide in position 6 are linked through a phosphodiester linkage"
  misc_feature 6: /note="A is a 2'-fluoro-adenosine (fA)"
  misc_feature 6: /note="The nucleotide in position 6 and the nucleotide in position 5 are linked through a phosphodiester linkage"
  misc_feature 6: /note="The nucleotide in position 6 and the nucleotide in position 7 are linked through a phosphodiester linkage"
  misc_feature 7: /note="A is a 2'-O-Methyladenosine (mA)"
  misc_feature 7: /note="The nucleotide in position 7 and the nucleotide in position 6 are linked through a phosphodiester linkage"
  misc_feature 7: /note="The nucleotide in position 7 and the nucleotide in position 8 are linked through a phosphodiester linkage"
  misc_feature 8: /note="A is a 2'-fluoro-adenosine (fA)"
  misc_feature 8: /note="The nucleotide in position 8 and the nucleotide in position 7 are linked through a phosphodiester linkage"
  misc_feature 8: /note="The nucleotide in position 8 and the nucleotide in position 9 are linked through a phosphodiester linkage"
  misc_feature 9: /note="A is a 2'-O-Methyladenosine (mA)"
  misc_feature 9: /note="The nucleotide in position 9 and the nucleotide in position 8 are linked through a phosphodiester linkage"
  misc_feature 9: /note="The nucleotide in position 9 and the nucleotide in position 10 are linked through a phosphodiester linkage"
  misc_feature 10: /note="A is a 2'-fluoro-adenosine (fA)"
  misc_feature 10: /note="The nucleotide in position 10 and the nucleotide in position 9 are linked through a phosphodiester linkage"
  misc_feature 10: /note="The nucleotide in position 10 and the nucleotide in position 11 are linked through a phosphodiester linkage"
  misc_feature 11: /note="G is a 2'-O-Methylguanosine (mG)"
  misc_feature 11: /note="The nucleotide in position 11 and the nucleotide in position 10 are linked through a phosphodiester linkage"
  misc_feature 11: /note="The nucleotide in position 11 and the nucleotide in position 12 are linked through a phosphodiester linkage"
  misc_feature 12: /note="U is a 2'-fluoro-uridine (fU)"
  misc_feature 12: /note="The nucleotide in position 12 and the nucleotide in position 11 are linked through a phosphodiester linkage"
  misc_feature 12: /note="The nucleotide in position 12 and the nucleotide in position 13 are linked through a phosphodiester linkage"
  misc_feature 13: /note="C is a 2'-O-Methylcytidine (mC)"
  misc_feature 13: /note="The nucleotide in position 13 and the nucleotide in position 12 are linked through a phosphodiester linkage"
  misc_feature 13: /note="The nucleotide in position 13 and the nucleotide in position 14 are linked through a phosphodiester linkage"
  misc_feature 14: /note="A is a 2'-fluoro-adenosine (fA)"
  misc_feature 14: /note="The nucleotide in position 14 and the nucleotide in position 13 are linked through a phosphodiester linkage"
  misc_feature 14: /note="The nucleotide in position 14 and the nucleotide in position 15 are linked through a phosphodiester linkage"
  misc_feature 15: /note="C is a 2'-O-Methylcytidine (mC)"
  misc_feature 15: /note="The nucleotide in position 15 and the nucleotide in position 14 are linked through a phosphodiester linkage"
  misc_feature 15: /note="The nucleotide in position 15 and the nucleotide in position 16 are linked through a phosphodiester linkage"
  misc_feature 16: /note="C is a 2'-fluoro-cytidine (fC)"
  misc_feature 16: /note="The nucleotide in position 16 and the nucleotide in position 15 are linked through a phosphodiester linkage"
  misc_feature 16: /note="The nucleotide in position 16 and the nucleotide in position 17 are linked through a phosphodiester linkage"
  misc_feature 17: /note="A is a 2'-O-Methyladenosine (mA)"
  misc_feature 17: /note="The nucleotide in position 17 and the nucleotide in position 16 are linked through a phosphodiester linkage"
  misc_feature 17: /note="The nucleotide in position 17 and the nucleotide in position 18 are linked through a phosphodiester linkage"
  misc_feature 18: /note="U is a 2'-fluoro-uridine (fU)"
  misc_feature 18: /note="The nucleotide in position 18 and the nucleotide in position 17 are linked through a phosphodiester linkage"
  misc_feature 18: /note="The nucleotide in position 18 and the nucleotide in position 19 are linked through a phosphodiester linkage"
  misc_feature 19: /note="A is a 2'-O-Methyladenosine (mA)"
  misc_feature 19: /note="The nucleotide in position 19 and the nucleotide in position 18 are linked through a phosphodiester linkage"
  misc_feature 19: /note="The nucleotide in position 19 and the nucleotide in position 20 are linked through a phosphorothioate linkage"
  misc_feature 20: /note="T is a deoxythymidine"
  misc_feature 20: /note="The nucleotide in position 20 and the nucleotide in position 19 are linked through a phosphorothioate linkage"
  misc_feature 20: /note="The nucleotide in position 20 and the nucleotide in position 21 are linked through a phosphorothioate linkage"
  misc_feature 21: /note="T is a deoxythymidine"
  misc_feature 21: /note="The nucleotide in position 21 and the nucleotide in position 20 are linked through a phosphorothioate linkage"
auuuuaaaaagucaccauatt

SEQ ID NO: 590 - RNA, 21 nt, Artificial Sequence
  as C027.001#01; #06; #11; #20; #29; #34; #39; #48; #57; #62
  misc_feature 1: /note="A is a 2'-O-Methyladenosine (mA)"
  misc_feature 1: /note="The nucleotide in position 1 and the nucleotide in position 2 are linked through a phosphorothioate linkage"
  misc_feature 2: /note="U is a 2'-fluoro-uridine (fU)"
  misc_feature 2: /note="The nucleotide in position 2 and the nucleotide in position 1 are linked through a phosphorothioate linkage"
  misc_feature 2: /note="The nucleotide in position 2 and the nucleotide in position 3 are linked through a phosphorothioate linkage"
  misc_feature 3: /note="U is a 2'-O-Methyluridine (mU)"
  misc_feature 3: /note="The nucleotide in position 3 and the nucleotide in position 2 are linked through a phosphorothioate linkage"
  misc_feature 3: /note="The nucleotide in position 3 and the nucleotide in position 4 are linked through a phosphodiester linkage"
  misc_feature 4: /note="U is a 2'-fluoro-uridine (fU)"
  misc_feature 4: /note="The nucleotide in position 4 and the nucleotide in position 3 are linked through a phosphodiester linkage"
  misc_feature 4: /note="The nucleotide in position 4 and the nucleotide in position 5 are linked through a phosphodiester linkage"
  misc_feature 5: /note="U is a 2'-O-Methyluridine (mU)"
  misc_feature 5: /note="The nucleotide in position 5 and the nucleotide in position 4 are linked through a phosphodiester linkage"
  misc_feature 5: /note="The nucleotide in position 5 and the nucleotide in position 6 are linked through a phosphodiester linkage"
  misc_feature 6: /note="A is a 2'-O-Methyladenosine (mA)"
  misc_feature 6: /note="The nucleotide in position 6 and the nucleotide in position 5 are linked through a phosphodiester linkage"
  misc_feature 6: /note="The nucleotide in position 6 and the nucleotide in position 7 are linked through a phosphodiester linkage"
  misc_feature 7: /note="A is a 2'-O-Methyladenosine (mA)"
  misc_feature 7: /note="The nucleotide in position 7 and the nucleotide in position 6 are linked through a phosphodiester linkage"
  misc_feature 7: /note="The nucleotide in position 7 and the nucleotide in position 8 are linked through a phosphodiester linkage"
  misc_feature 8: /note="A is a 2'-O-Methyladenosine (mA)"
  misc_feature 8: /note="The nucleotide in position 8 and the nucleotide in position 7 are linked through a phosphodiester linkage"
  misc_feature 8: /note="The nucleotide in position 8 and the nucleotide in position 9 are linked through a phosphodiester linkage"
  misc_feature 9: /note="A is a 2'-O-Methyladenosine (mA)"
  misc_feature 9: /note="The nucleotide in position 9 and the nucleotide in position 8 are linked through a phosphodiester linkage"
  misc_feature 9: /note="The nucleotide in position 9 and the nucleotide in position 10 are linked through a phosphodiester linkage"
  misc_feature 10: /note="A is a 2'-O-Methyladenosine (mA)"
  misc_feature 10: /note="The nucleotide in position 10 and the nucleotide in position 9 are linked through a phosphodiester linkage"
  misc_feature 10: /note="The nucleotide in position 10 and the nucleotide in position 11 are linked through a phosphodiester linkage"
  misc_feature 11: /note="G is a 2'-O-Methylguanosine (mG)"
  misc_feature 11: /note="The nucleotide in position 11 and the nucleotide in position 10 are linked through a phosphodiester linkage"
  misc_feature 11: /note="The nucleotide in position 11 and the nucleotide in position 12 are linked through a phosphodiester linkage"
  misc_feature 12: /note="U is a 2'-O-Methyluridine (mU)"
  misc_feature 12: /note="The nucleotide in position 12 and the nucleotide in position 11 are linked through a phosphodiester linkage"
  misc_feature 12: /note="The nucleotide in position 12 and the nucleotide in position 13 are linked through a phosphodiester linkage"
  misc_feature 13: /note="C is a 2'-O-Methylcytidine (mC)"
  misc_feature 13: /note="The nucleotide in position 13 and the nucleotide in position 12 are linked through a phosphodiester linkage"
  misc_feature 13: /note="The nucleotide in position 13 and the nucleotide in position 14 are linked through a phosphodiester linkage"
  misc_feature 14: /note="A is a 2'-fluoro-adenosine (fA)"
  misc_feature 14: /note="The nucleotide in position 14 and the nucleotide in position 13 are linked through a phosphodiester linkage"
  misc_feature 14: /note="The nucleotide in position 14 and the nucleotide in position 15 are linked through a phosphodiester linkage"
  misc_feature 15: /note="C is a 2'-O-Methylcytidine (mC)"
  misc_feature 15: /note="The nucleotide in position 15 and the nucleotide in position 14 are linked through a phosphodiester linkage"
  misc_feature 15: /note="The nucleotide in position 15 and the nucleotide in position 16 are linked through a phosphodiester linkage"
  misc_feature 16: /note="C is a 2'-fluoro-cytidine (fC)"
  misc_feature 16: /note="The nucleotide in position 16 and the nucleotide in position 15 are linked through a phosphodiester linkage"
  misc_feature 16: /note="The nucleotide in position 16 and the nucleotide in position 17 are linked through a phosphodiester linkage"
  misc_feature 17: /note="A is a 2'-O-Methyladenosine (mA)"
  misc_feature 17: /note="The nucleotide in position 17 and the nucleotide in position 16 are linked through a phosphodiester linkage"
  misc_feature 17: /note="The nucleotide in position 17 and the nucleotide in position 18 are linked through a phosphodiester linkage"
  misc_feature 18: /note="U is a 2'-O-Methyluridine (mU)"
  misc_feature 18: /note="The nucleotide in position 18 and the nucleotide in position 17 are linked through a phosphodiester linkage"
  misc_feature 18: /note="The nucleotide in position 18 and the nucleotide in position 19 are linked through a phosphodiester linkage"
  misc_feature 19: /note="A is a 2'-O-Methyladenosine (mA)"
  misc_feature 19: /note="The nucleotide in position 19 and the nucleotide in position 18 are linked through a phosphodiester linkage"
  misc_feature 19: /note="The nucleotide in position 19 and the nucleotide in position 20 are linked through a phosphorothioate linkage"
  misc_feature 20: /note="A is a 2'-O-Methyladenosine (mA)"
  misc_feature 20: /note="The nucleotide in position 20 and the nucleotide in position 19 are linked through a phosphorothioate linkage"
  misc_feature 20: /note="The nucleotide in position 20 and the nucleotide in position 21 are linked through a phosphorothioate linkage"
  misc_feature 21: /note="A is a 2'-O-Methyladenosine (mA)"
  misc_feature 21: /note="The nucleotide in position 21 and the nucleotide in position 20 are linked through a phosphorothioate linkage"
auuuuaaaaagucaccauaaa

SEQ ID NO: 591 - RNA, 21 nt, Artificial Sequence
  as C027.001#02; #07; #12; #21; #30; #35; #40; #49; #58; #63
  misc_feature 1: /note="A is a 2'-O-Methyladenosine (mA)"
  misc_feature 1: /note="The nucleotide in position 1 and the nucleotide in position 2 are linked through a phosphorothioate linkage"
  misc_feature 2: /note="U is a 2'-fluoro-uridine (fU)"
  misc_feature 2: /note="The nucleotide in position 2 and the nucleotide in position 1 are linked through a phosphorothioate linkage"
  misc_feature 2: /note="The nucleotide in position 2 and the nucleotide in position 3 are linked through a phosphorothioate linkage"
  misc_feature 3: /note="U is a 2'-O-Methyluridine (mU)"
  misc_feature 3: /note="The nucleotide in position 3 and the nucleotide in position 2 are linked through a phosphorothioate linkage"
  misc_feature 3: /note="The nucleotide in position 3 and the nucleotide in position 4 are linked through a phosphodiester linkage"
  misc_feature 4: /note="U is a 2'-O-Methyluridine (mU)"
  misc_feature 4: /note="The nucleotide in position 4 and the nucleotide in position 3 are linked through a phosphodiester linkage"
  misc_feature 4: /note="The nucleotide in position 4 and the nucleotide in position 5 are linked through a phosphodiester linkage"
  misc_feature 5: /note="U is a 2'-O-Methyluridine (mU)"
  misc_feature 5: /note="The nucleotide in position 5 and the nucleotide in position 4 are linked through a phosphodiester linkage"
  misc_feature 5: /note="The nucleotide in position 5 and the nucleotide in position 6 are linked through a phosphodiester linkage"
  misc_feature 6: /note="A is a 2'-fluoro-adenosine (fA)"
  misc_feature 6: /note="The nucleotide in position 6 and the nucleotide in position 5 are linked through a phosphodiester linkage"
  misc_feature 6: /note="The nucleotide in position 6 and the nucleotide in position 7 are linked through a phosphodiester linkage"
  misc_feature 7: /note="A is a 2'-O-Methyladenosine (mA)"
  misc_feature 7: /note="The nucleotide in position 7 and the nucleotide in position 6 are linked through a phosphodiester linkage"
  misc_feature 7: /note="The nucleotide in position 7 and the nucleotide in position 8 are linked through a phosphodiester linkage"
  misc_feature 8: /note="A is a 2'-O-Methyladenosine (mA)"
  misc_feature 8: /note="The nucleotide in position 8 and the nucleotide in position 7 are linked through a phosphodiester linkage"
  misc_feature 8: /note="The nucleotide in position 8 and the nucleotide in position 9 are linked through a phosphodiester linkage"
  misc_feature 9: /note="A is a 2'-O-Methyladenosine (mA)"
  misc_feature 9: /note="The nucleotide in position 9 and the nucleotide in position 8 are linked through a phosphodiester linkage"
  misc_feature 9: /note="The nucleotide in position 9 and the nucleotide in position 10 are linked through a phosphodiester linkage"
  misc_feature 10: /note="A is a 2'-O-Methyladenosine (mA)"
  misc_feature 10: /note="The nucleotide in position 10 and the nucleotide in position 9 are linked through a phosphodiester linkage"
  misc_feature 10: /note="The nucleotide in position 10 and the nucleotide in position 11 are linked through a phosphodiester linkage"
  misc_feature 11: /note="G is a 2'-O-Methylguanosine (mG)"
  misc_feature 11: /note="The nucleotide in position 11 and the nucleotide in position 10 are linked through a phosphodiester linkage"
  misc_feature 11: /note="The nucleotide in position 11 and the nucleotide in position 12 are linked through a phosphodiester linkage"
  misc_feature 12: /note="U is a 2'-O-Methyluridine (mU)"
  misc_feature 12: /note="The nucleotide in position 12 and the nucleotide in position 11 are linked through a phosphodiester linkage"
  misc_feature 12: /note="The nucleotide in position 12 and the nucleotide in position 13 are linked through a phosphodiester linkage"
  misc_feature 13: /note="C is a 2'-O-Methylcytidine (mC)"
  misc_feature 13: /note="The nucleotide in position 13 and the nucleotide in position 12 are linked through a phosphodiester linkage"
  misc_feature 13: /note="The nucleotide in position 13 and the nucleotide in position 14 are linked through a phosphodiester linkage"
  misc_feature 14: /note="A is a 2'-fluoro-adenosine (fA)"
  misc_feature 14: /note="The nucleotide in position 14 and the nucleotide in position 13 are linked through a phosphodiester linkage"
  misc_feature 14: /note="The nucleotide in position 14 and the nucleotide in position 15 are linked through a phosphodiester linkage"
  misc_feature 15: /note="C is a 2'-O-Methylcytidine (mC)"
  misc_feature 15: /note="The nucleotide in position 15 and the nucleotide in position 14 are linked through a phosphodiester linkage"
  misc_feature 15: /note="The nucleotide in position 15 and the nucleotide in position 16 are linked through a phosphodiester linkage"
  misc_feature 16: /note="C is a 2'-fluoro-cytidine (fC)"
  misc_feature 16: /note="The nucleotide in position 16 and the nucleotide in position 15 are linked through a phosphodiester linkage"
  misc_feature 16: /note="The nucleotide in position 16 and the nucleotide in position 17 are linked through a phosphodiester linkage"
  misc_feature 17: /note="A is a 2'-O-Methyladenosine (mA)"
  misc_feature 17: /note="The nucleotide in position 17 and the nucleotide in position 16 are linked through a phosphodiester linkage"
  misc_feature 17: /note="The nucleotide in position 17 and the nucleotide in position 18 are linked through a phosphodiester linkage"
  misc_feature 18: /note="U is a 2'-O-Methyluridine (mU)"
  misc_feature 18: /note="The nucleotide in position 18 and the nucleotide in position 17 are linked through a phosphodiester linkage"
  misc_feature 18: /note="The nucleotide in position 18 and the nucleotide in position 19 are linked through a phosphodiester linkage"
  misc_feature 19: /note="A is a 2'-O-Methyladenosine (mA)"
  misc_feature 19: /note="The nucleotide in position 19 and the nucleotide in position 18 are linked through a phosphodiester linkage"
  misc_feature 19: /note="The nucleotide in position 19 and the nucleotide in position 20 are linked through a phosphorothioate linkage"
  misc_feature 20: /note="A is a 2'-O-Methyladenosine (mA)"
  misc_feature 20: /note="The nucleotide in position 20 and the nucleotide in position 19 are linked through a phosphorothioate linkage"
  misc_feature 20: /note="The nucleotide in position 20 and the nucleotide in position 21 are linked through a phosphorothioate linkage"
  misc_feature 21: /note="A is a 2'-O-Methyladenosine (mA)"
  misc_feature 21: /note="The nucleotide in position 21 and the nucleotide in position 20 are linked through a phosphorothioate linkage"
auuuuaaaaagucaccauaaa

SEQ ID NO: 592 - RNA, 21 nt, Artificial Sequence
  as C027.001#03; #08; #13; #22; #31; #36; #41; #50; #59; #64
  misc_feature 1: /note="A is a 2'-O-Methyladenosine (mA)"
  misc_feature 1: /note="The nucleotide in position 1 and the nucleotide in position 2 are linked through a phosphorothioate linkage"
  misc_feature 2: /note="U is a 2'-fluoro-uridine (fU)"
  misc_feature 2: /note="The nucleotide in position 2 and the nucleotide in position 1 are linked through a phosphorothioate linkage"
  misc_feature 2: /note="The nucleotide in position 2 and the nucleotide in position 3 are linked through a phosphorothioate linkage"
  misc_feature 3: /note="U is a 2'-O-Methyluridine (mU)"
  misc_feature 3: /note="The nucleotide in position 3 and the nucleotide in position 2 are linked through a phosphorothioate linkage"
  misc_feature 3: /note="The nucleotide in position 3 and the nucleotide in position 4 are linked through a phosphodiester linkage"
  misc_feature 4: /note="U is a 2'-fluoro-uridine (fU)"
  misc_feature 4: /note="The nucleotide in position 4 and the nucleotide in position 3 are linked through a phosphodiester linkage"
  misc_feature 4: /note="The nucleotide in position 4 and the nucleotide in position 5 are linked through a phosphodiester linkage"
  misc_feature 5: /note="U is a 2'-O-Methyluridine (mU)"
  misc_feature 5: /note="The nucleotide in position 5 and the nucleotide in position 4 are linked through a phosphodiester linkage"
  misc_feature 5: /note="The nucleotide in position 5 and the nucleotide in position 6 are linked through a phosphodiester linkage"
  misc_feature 6: /note="A is a 2'-O-Methyladenosine (mA)"
  misc_feature 6: /note="The nucleotide in position 6 and the nucleotide in position 5 are linked through a phosphodiester linkage"
  misc_feature 6: /note="The nucleotide in position 6 and the nucleotide in position 7 are linked through a phosphodiester linkage"
  misc_feature 7: /note="A is a 2'-O-Methyladenosine (mA)"
  misc_feature 7: /note="The nucleotide in position 7 and the nucleotide in position 6 are linked through a phosphodiester linkage"
  misc_feature 7: /note="The nucleotide in position 7 and the nucleotide in position 8 are linked through a phosphodiester linkage"
  misc_feature 8: /note="A is a 2'-fluoro-adenosine (fA)"
  misc_feature 8: /note="The nucleotide in position 8 and the nucleotide in position 7 are linked through a phosphodiester linkage"
  misc_feature 8: /note="The nucleotide in position 8 and the nucleotide in position 9 are linked through a phosphodiester linkage"
  misc_feature 9: /note="A is a 2'-fluoro-adenosine (fA)"
  misc_feature 9: /note="The nucleotide in position 9 and the nucleotide in position 8 are linked through a phosphodiester linkage"
  misc_feature 9: /note="The nucleotide in position 9 and the nucleotide in position 10 are linked through a phosphodiester linkage"
  misc_feature 10: /note="A is a 2'-O-Methyladenosine (mA)"
  misc_feature 10: /note="The nucleotide in position 10 and the nucleotide in position 9 are linked through a phosphodiester linkage"
  misc_feature 10: /note="The nucleotide in position 10 and the nucleotide in position 11 are linked through a phosphodiester linkage"
  misc_feature 11: /note="G is a 2'-O-Methylguanosine (mG)"
  misc_feature 11: /note="The nucleotide in position 11 and the nucleotide in position 10 are linked through a phosphodiester linkage"
  misc_feature 11: /note="The nucleotide in position 11 and the nucleotide in position 12 are linked through a phosphodiester linkage"
  misc_feature 12: /note="U is a 2'-O-Methyluridine (mU)"
  misc_feature 12: /note="The nucleotide in position 12 and the nucleotide in position 11 are linked through a phosphodiester linkage"
  misc_feature 12: /note="The nucleotide in position 12 and the nucleotide in position 13 are linked through a phosphodiester linkage"
  misc_feature 13: /note="C is a 2'-O-Methylcytidine (mC)"
  misc_feature 13: /note="The nucleotide in position 13 and the nucleotide in position 12 are linked through a phosphodiester linkage"
  misc_feature 13: /note="The nucleotide in position 13 and the nucleotide in position 14 are linked through a phosphodiester linkage"
  misc_feature 14: /note="A is a 2'-fluoro-adenosine (fA)"
  misc_feature 14: /note="The nucleotide in position 14 and the nucleotide in position 13 are linked through a phosphodiester linkage"
  misc_feature 14: /note="The nucleotide in position 14 and the nucleotide in position 15 are linked through a phosphodiester linkage"
  misc_feature 15: /note="C is a 2'-O-Methylcytidine (mC)"
  misc_feature 15: /note="The nucleotide in position 15 and the nucleotide in position 14 are linked through a phosphodiester linkage"
  misc_feature 15: /note="The nucleotide in position 15 and the nucleotide in position 16 are linked through a phosphodiester linkage"
  misc_feature 16: /note="C is a 2'-fluoro-cytidine (fC)"
  misc_feature 16: /note="The nucleotide in position 16 and the nucleotide in position 15 are linked through a phosphodiester linkage"
  misc_feature 16: /note="The nucleotide in position 16 and the nucleotide in position 17 are linked through a phosphodiester linkage"
  misc_feature 17: /note="A is a 2'-O-Methyladenosine (mA)"
  misc_feature 17: /note="The nucleotide in position 17 and the nucleotide in position 16 are linked through a phosphodiester linkage"
  misc_feature 17: /note="The nucleotide in position 17 and the nucleotide in position 18 are linked through a phosphodiester linkage"
  misc_feature 18: /note="U is a 2'-O-Methyluridine (mU)"
  misc_feature 18: /note="The nucleotide in position 18 and the nucleotide in position 17 are linked through a phosphodiester linkage"
  misc_feature 18: /note="The nucleotide in position 18 and the nucleotide in position 19 are linked through a phosphodiester linkage"
  misc_feature 19: /note="A is a 2'-O-Methyladenosine (mA)"
  misc_feature 19: /note="The nucleotide in position 19 and the nucleotide in position 18 are linked through a phosphodiester linkage"
  misc_feature 19: /note="The nucleotide in position 19 and the nucleotide in position 20 are linked through a phosphorothioate linkage"
  misc_feature 20: /note="A is a 2'-O-Methyladenosine (mA)"
  misc_feature 20: /note="The nucleotide in position 20 and the nucleotide in position 19 are linked through a phosphorothioate linkage"
  misc_feature 20: /note="The nucleotide in position 20 and the nucleotide in position 21 are linked through a phosphorothioate linkage"
  misc_feature 21: /note="A is a 2'-O-Methyladenosine (mA)"
  misc_feature 21: /note="The nucleotide in position 21 and the nucleotide in position 20 are linked through a phosphorothioate linkage"
auuuuaaaaagucaccauaaa

SEQ ID NO: 593 - RNA, 21 nt, Artificial Sequence
  as C027.001#04; #09; #14; #23; #32; #37; #42; #51; #60; #65
  misc_feature 1: /note="A is a 2'-O-Methyladenosine (mA)"
  misc_feature 1: /note="The nucleotide in position 1 and the nucleotide in position 2 are linked through a phosphorothioate linkage"
  misc_feature 2: /note="U is a 2'-fluoro-uridine (fU)"
  misc_feature 2: /note="The nucleotide in position 2 and the nucleotide in position 1 are linked through a phosphorothioate linkage"
  misc_feature 2: /note="The nucleotide in position 2 and the nucleotide in position 3 are linked through a phosphorothioate linkage"
  misc_feature 3: /note="U is a 2'-O-Methyluridine (mU)"
  misc_feature 3: /note="The nucleotide in position 3 and the nucleotide in position 2 are linked through a phosphorothioate linkage"
  misc_feature 3: /note="The nucleotide in position 3 and the nucleotide in position 4 are linked through a phosphodiester linkage"
  misc_feature 4: /note="U is a 2'-fluoro-uridine (fU)"
  misc_feature 4: /note="The nucleotide in position 4 and the nucleotide in position 3 are linked through a phosphodiester linkage"
  misc_feature 4: /note="The nucleotide in position 4 and the nucleotide in position 5 are linked through a phosphodiester linkage"
  misc_feature 5: /note="U is a 2'-O-Methyluridine (mU)"
  misc_feature 5: /note="The nucleotide in position 5 and the nucleotide in position 4 are linked through a phosphodiester linkage"
  misc_feature 5: /note="The nucleotide in position 5 and the nucleotide in position 6 are linked through a phosphodiester linkage"
  misc_feature 6: /note="A is a 2'-O-Methyladenosine (mA)"
  misc_feature 6: /note="The nucleotide in position 6 and the nucleotide in position 5 are linked through a phosphodiester linkage"
  misc_feature 6: /note="The nucleotide in position 6 and the nucleotide in position 7 are linked through a phosphodiester linkage"
  misc_feature 7: /note="A is a 2'-O-Methyladenosine (mA)"
  misc_feature 7: /note="The nucleotide in position 7 and the nucleotide in position 6 are linked through a phosphodiester linkage"
  misc_feature 7: /note="The nucleotide in position 7 and the nucleotide in position 8 are linked through a phosphodiester linkage"
  misc_feature 8: /note="A is a 2'-O-Methyladenosine (mA)"
  misc_feature 8: /note="The nucleotide in position 8 and the nucleotide in position 7 are linked through a phosphodiester linkage"
  misc_feature 8: /note="The nucleotide in position 8 and the nucleotide in position 9 are linked through a phosphodiester linkage"
  misc_feature 9: /note="A is a 2'-fluoro-adenosine (fA)"
  misc_feature 9: /note="The nucleotide in position 9 and the nucleotide in position 8 are linked through a phosphodiester linkage"
  misc_feature 9: /note="The nucleotide in position 9 and the nucleotide in position 10 are linked through a phosphodiester linkage"
  misc_feature 10: /note="A is a 2'-O-Methyladenosine (mA)"
  misc_feature 10: /note="The nucleotide in position 10 and the nucleotide in position 9 are linked through a phosphodiester linkage"
  misc_feature 10: /note="The nucleotide in position 10 and the nucleotide in position 11 are linked through a phosphodiester linkage"
  misc_feature 11: /note="G is a 2'-O-Methylguanosine (mG)"
  misc_feature 11: /note="The nucleotide in position 11 and the nucleotide in position 10 are linked through a phosphodiester linkage"
  misc_feature 11: /note="The nucleotide in position 11 and the nucleotide in position 12 are linked through a phosphodiester linkage"
  misc_feature 12: /note="U is a 2'-O-Methyluridine (mU)"
  misc_feature 12: /note="The nucleotide in position 12 and the nucleotide in position 11 are linked through a phosphodiester linkage"
  misc_feature 12: /note="The nucleotide in position 12 and the nucleotide in position 13 are linked through a phosphodiester linkage"
  misc_feature 13: /note="C is a 2'-O-Methylcytidine (mC)"
  misc_feature 13: /note="The nucleotide in position 13 and the nucleotide in position 12 are linked through a phosphodiester linkage"
  misc_feature 13: /note="The nucleotide in position 13 and the nucleotide in position 14 are linked through a phosphodiester linkage"
  misc_feature 14: /note="A is a 2'-fluoro-adenosine (fA)"
  misc_feature 14: /note="The nucleotide in position 14 and the nucleotide in position 13 are linked through a phosphodiester linkage"
  misc_feature 14: /note="The nucleotide in position 14 and the nucleotide in position 15 are linked through a phosphodiester linkage"
  misc_feature 15: /note="C is a 2'-O-Methylcytidine (mC)"
  misc_feature 15: /note="The nucleotide in position 15 and the nucleotide in position 14 are linked through a phosphodiester linkage"
  misc_feature 15: /note="The nucleotide in position 15 and the nucleotide in position 16 are linked through a phosphodiester linkage"
  misc_feature 16: /note="C is a 2'-fluoro-cytidine (fC)"
  misc_feature 16: /note="The nucleotide in position 16 and the nucleotide in position 15 are linked through a phosphodiester linkage"
  misc_feature 16: /note="The nucleotide in position 16 and the nucleotide in position 17 are linked through a phosphodiester linkage"
  misc_feature 17: /note="A is a 2'-O-Methyladenosine (mA)"
  misc_feature 17: /note="The nucleotide in position 17 and the nucleotide in position 16 are linked through a phosphodiester linkage"
  misc_feature 17: /note="The nucleotide in position 17 and the nucleotide in position 18 are linked through a phosphodiester linkage"
  misc_feature 18: /note="U is a 2'-O-Methyluridine (mU)"
  misc_feature 18: /note="The nucleotide in position 18 and the nucleotide in position 17 are linked through a phosphodiester linkage"
  misc_feature 18: /note="The nucleotide in position 18 and the nucleotide in position 19 are linked through a phosphodiester linkage"
  misc_feature 19: /note="A is a 2'-O-Methyladenosine (mA)"
  misc_feature 19: /note="The nucleotide in position 19 and the nucleotide in position 18 are linked through a phosphodiester linkage"
  misc_feature 19: /note="The nucleotide in position 19 and the nucleotide in position 20 are linked through a phosphorothioate linkage"
  misc_feature 20: /note="A is a 2'-O-Methyladenosine (mA)"
  misc_feature 20: /note="The nucleotide in position 20 and the nucleotide in position 19 are linked through a phosphorothioate linkage"
  misc_feature 20: /note="The nucleotide in position 20 and the nucleotide in position 21 are linked through a phosphorothioate linkage"
  misc_feature 21: /note="A is a 2'-O-Methyladenosine (mA)"
  misc_feature 21: /note="The nucleotide in position 21 and the nucleotide in position 20 are linked through a phosphorothioate linkage"
auuuuaaaaagucaccauaaa

SEQ ID NO: 594 - RNA, 21 nt, Artificial Sequence
  as C027.001#05; #10; #15; #24; #33; #38; #43; #52; #61; #66
  misc_feature 1: /note="A is a 2'-fluoro-adenosine (fA)"
  misc_feature 1: /note="The nucleotide in position 1 and the nucleotide in position 2 are linked through a phosphorothioate linkage"
  misc_feature 2: /note="U is a 2'-fluoro-uridine (fU)"
  misc_feature 2: /note="The nucleotide in position 2 and the nucleotide in position 1 are linked through a phosphorothioate linkage"
  misc_feature 2: /note="The nucleotide in position 2 and the nucleotide in position 3 are linked through a phosphorothioate linkage"
  misc_feature 3: /note="U is a 2'-O-Methyluridine (mU)"
  misc_feature 3: /note="The nucleotide in position 3 and the nucleotide in position 2 are linked through a phosphorothioate linkage"
  misc_feature 3: /note="The nucleotide in position 3 and the nucleotide in position 4 are linked through a phosphodiester linkage"
  misc_feature 4: /note="U is a 2'-fluoro-uridine (fU)"
  misc_feature 4: /note="The nucleotide in position 4 and the nucleotide in position 3 are linked through a phosphodiester linkage"
  misc_feature 4: /note="The nucleotide in position 4 and the nucleotide in position 5 are linked through a phosphodiester linkage"
  misc_feature 5: /note="U is a 2'-O-Methyluridine (mU)"
  misc_feature 5: /note="The nucleotide in position 5 and the nucleotide in position 4 are linked through a phosphodiester linkage"
  misc_feature 5: /note="The nucleotide in position 5 and the nucleotide in position 6 are linked through a phosphodiester linkage"
  misc_feature 6: /note="A is a 2'-fluoro-adenosine (fA)"
  misc_feature 6: /note="The nucleotide in position 6 and the nucleotide in position 5 are linked through a phosphodiester linkage"
  misc_feature 6: /note="The nucleotide in position 6 and the nucleotide in position 7 are linked through a phosphodiester linkage"
  misc_feature 7: /note="A is a 2'-O-Methyladenosine (mA)"
  misc_feature 7: /note="The nucleotide in position 7 and the nucleotide in position 6 are linked through a phosphodiester linkage"
  misc_feature 7: /note="The nucleotide in position 7 and the nucleotide in position 8 are linked through a phosphodiester linkage"
  misc_feature 8: /note="A is a 2'-fluoro-adenosine (fA)"
  misc_feature 8: /note="The nucleotide in position 8 and the nucleotide in position 7 are linked through a phosphodiester linkage"
  misc_feature 8: /note="The nucleotide in position 8 and the nucleotide in position 9 are linked through a phosphodiester linkage"
  misc_feature 9: /note="A is a 2'-O-Methyladenosine (mA)"
  misc_feature 9: /note="The nucleotide in position 9 and the nucleotide in position 8 are linked through a phosphodiester linkage"
  misc_feature 9: /note="The nucleotide in position 9 and the nucleotide in position 10 are linked through a phosphodiester linkage"
  misc_feature 10: /note="A is a 2'-fluoro-adenosine (fA)"
  misc_feature 10: /note="The nucleotide in position 10 and the nucleotide in position 9 are linked through a phosphodiester linkage"
  misc_feature 10: /note="The nucleotide in position 10 and the nucleotide in position 11 are linked through a phosphodiester linkage"
  misc_feature 11: /note="G is a 2'-O-Methylguanosine (mG)"
  misc_feature 11: /note="The nucleotide in position 11 and the nucleotide in position 10 are linked through a phosphodiester linkage"
  misc_feature 11: /note="The nucleotide in position 11 and the nucleotide in position 12 are linked through a phosphodiester linkage"
  misc_feature 12: /note="U is a 2'-O-Methyluridine (mU)"
  misc_feature 12: /note="The nucleotide in position 12 and the nucleotide in position 11 are linked through a phosphodiester linkage"
  misc_feature 12: /note="The nucleotide in position 12 and the nucleotide in position 13 are linked through a phosphodiester linkage"
  misc_feature 13: /note="C is a 2'-O-Methylcytidine (mC)"
  misc_feature 13: /note="The nucleotide in position 13 and the nucleotide in position 12 are linked through a phosphodiester linkage"
  misc_feature 13: /note="The nucleotide in position 13 and the nucleotide in position 14 are linked through a phosphodiester linkage"
  misc_feature 14: /note="A is a 2'-fluoro-adenosine (fA)"
  misc_feature 14: /note="The nucleotide in position 14 and the nucleotide in position 13 are linked through a phosphodiester linkage"
  misc_feature 14: /note="The nucleotide in position 14 and the nucleotide in position 15 are linked through a phosphodiester linkage"
  misc_feature 15: /note="C is a 2'-O-Methylcytidine (mC)"
  misc_feature 15: /note="The nucleotide in position 15 and the nucleotide in position 14 are linked through a phosphodiester linkage"
  misc_feature 15: /note="The nucleotide in position 15 and the nucleotide in position 16 are linked through a phosphodiester linkage"
  misc_feature 16: /note="C is a 2'-fluoro-cytidine (fC)"
  misc_feature 16: /note="The nucleotide in position 16 and the nucleotide in position 15 are linked through a phosphodiester linkage"
  misc_feature 16: /note="The nucleotide in position 16 and the nucleotide in position 17 are linked through a phosphodiester linkage"
  misc_feature 17: /note="A is a 2'-O-Methyladenosine (mA)"
  misc_feature 17: /note="The nucleotide in position 17 and the nucleotide in position 16 are linked through a phosphodiester linkage"
  misc_feature 17: /note="The nucleotide in position 17 and the nucleotide in position 18 are linked through a phosphodiester linkage"
  misc_feature 18: /note="U is a 2'-fluoro-uridine (fU)"
  misc_feature 18: /note="The nucleotide in position 18 and the nucleotide in position 17 are linked through a phosphodiester linkage"
  misc_feature 18: /note="The nucleotide in position 18 and the nucleotide in position 19 are linked through a phosphodiester linkage"
  misc_feature 19: /note="A is a 2'-O-Methyladenosine (mA)"
  misc_feature 19: /note="The nucleotide in position 19 and the nucleotide in position 18 are linked through a phosphodiester linkage"
  misc_feature 19: /note="The nucleotide in position 19 and the nucleotide in position 20 are linked through a phosphorothioate linkage"
  misc_feature 20: /note="T is a deoxythymidine"
  misc_feature 20: /note="The nucleotide in position 20 and the nucleotide in position 19 are linked through a phosphorothioate linkage"
  misc_feature 20: /note="The nucleotide in position 20 and the nucleotide in position 21 are linked through a phosphorothioate linkage"
  misc_feature 21: /note="T is a deoxythymidine"
  misc_feature 21: /note="The nucleotide in position 21 and the nucleotide in position 20 are linked through a phosphorothioate linkage"
auuuuaaaaagucaccauatt

SEQ ID NO: 595 - RNA, 21 nt, Artificial Sequence
  as C027.001#16; #25; #44; #53
  misc_feature 1: /note="A is a 2'-O-Methyladenosine (mA)"
  misc_feature 1: /note="The nucleotide in position 1 and the nucleotide in position 2 are linked through a phosphorothioate linkage"
  misc_feature 2: /note="U is a 2'-fluoro-uridine (fU)"
  misc_feature 2: /note="The nucleotide in position 2 and the nucleotide in position 1 are linked through a phosphorothioate linkage"
  misc_feature 2: /note="The nucleotide in position 2 and the nucleotide in position 3 are linked through a phosphorothioate linkage"
  misc_feature 3: /note="U is a 2'-O-Methyluridine (mU)"
  misc_feature 3: /note="The nucleotide in position 3 and the nucleotide in position 2 are linked through a phosphorothioate linkage"
  misc_feature 3: /note="The nucleotide in position 3 and the nucleotide in position 4 are linked through a phosphodiester linkage"
  misc_feature 4: /note="U is a 2'-fluoro-uridine (fU)"
  misc_feature 4: /note="The nucleotide in position 4 and the nucleotide in position 3 are linked through a phosphodiester linkage"
  misc_feature 4: /note="The nucleotide in position 4 and the nucleotide in position 5 are linked through a phosphodiester linkage"
  misc_feature 5: /note="U is a 2'-O-Methyluridine (mU)"
  misc_feature 5: /note="The nucleotide in position 5 and the nucleotide in position 4 are linked through a phosphodiester linkage"
  misc_feature 5: /note="The nucleotide in position 5 and the nucleotide in position 6 are linked through a phosphodiester linkage"
  misc_feature 6: /note="A is a 2'-O-Methyladenosine (mA)"
  misc_feature 6: /note="The nucleotide in position 6 and the nucleotide in position 5 are linked through a phosphodiester linkage"
  misc_feature 6: /note="The nucleotide in position 6 and the nucleotide in position 7 are linked through a phosphodiester linkage"
  misc_feature 7: /note="A is a 2'-O-Methyladenosine (mA)"
  misc_feature 7: /note="The nucleotide in position 7 and the nucleotide in position 6 are linked through a phosphodiester linkage"
  misc_feature 7: /note="The nucleotide in position 7 and the nucleotide in position 8 are linked through a phosphodiester linkage"
  misc_feature 8: /note="A is a 2'-O-Methyladenosine (mA)"
  misc_feature 8: /note="The nucleotide in position 8 and the nucleotide in position 7 are linked through a phosphodiester linkage"
  misc_feature 8: /note="The nucleotide in position 8 and the nucleotide in position 9 are linked through a phosphodiester linkage"
  misc_feature 9: /note="A is a 2'-O-Methyladenosine (mA)"
  misc_feature 9: /note="The nucleotide in position 9 and the nucleotide in position 8 are linked through a phosphodiester linkage"
  misc_feature 9: /note="The nucleotide in position 9 and the nucleotide in position 10 are linked through a phosphodiester linkage"
  misc_feature 10: /note="A is a 2'-O-Methyladenosine (mA)"
  misc_feature 10: /note="The nucleotide in position 10 and the nucleotide in position 9 are linked through a phosphodiester linkage"
  misc_feature 10: /note="The nucleotide in position 10 and the nucleotide in position 11 are linked through a phosphodiester linkage"
  misc_feature 11: /note="G is a 2'-O-Methylguanosine (mG)"
  misc_feature 11: /note="The nucleotide in position 11 and the nucleotide in position 10 are linked through a phosphodiester linkage"
  misc_feature 11: /note="The nucleotide in position 11 and the nucleotide in position 12 are linked through a phosphodiester linkage"
  misc_feature 12: /note="U is a 2'-O-Methyluridine (mU)"
  misc_feature 12: /note="The nucleotide in position 12 and the nucleotide in position 11 are linked through a phosphodiester linkage"
  misc_feature 12: /note="The nucleotide in position 12 and the nucleotide in position 13 are linked through a phosphodiester linkage"
  misc_feature 13: /note="C is a 2'-O-Methylcytidine (mC)"
  misc_feature 13: /note="The nucleotide in position 13 and the nucleotide in position 12 are linked through a phosphodiester linkage"
  misc_feature 13: /note="The nucleotide in position 13 and the nucleotide in position 14 are linked through a phosphodiester linkage"
  misc_feature 14: /note="A is a 2'-fluoro-adenosine (fA)"
  misc_feature 14: /note="The nucleotide in position 14 and the nucleotide in position 13 are linked through a phosphodiester linkage"
  misc_feature 14: /note="The nucleotide in position 14 and the nucleotide in position 15 are linked through a phosphodiester linkage"
  misc_feature 15: /note="C is a 2'-O-Methylcytidine (mC)"
  misc_feature 15: /note="The nucleotide in position 15 and the nucleotide in position 14 are linked through a phosphodiester linkage"
  misc_feature 15: /note="The nucleotide in position 15 and the nucleotide in position 16 are linked through a phosphodiester linkage"
  misc_feature 16: /note="C is a 2'-fluoro-cytidine (fC)"
  misc_feature 16: /note="The nucleotide in position 16 and the nucleotide in position 15 are linked through a phosphodiester linkage"
  misc_feature 16: /note="The nucleotide in position 16 and the nucleotide in position 17 are linked through a phosphodiester linkage"
  misc_feature 17: /note="A is a 2'-O-Methyladenosine (mA)"
  misc_feature 17: /note="The nucleotide in position 17 and the nucleotide in position 16 are linked through a phosphodiester linkage"
  misc_feature 17: /note="The nucleotide in position 17 and the nucleotide in position 18 are linked through a phosphodiester linkage"
  misc_feature 18: /note="U is a 2'-O-Methyluridine (mU)"
  misc_feature 18: /note="The nucleotide in position 18 and the nucleotide in position 17 are linked through a phosphodiester linkage"
  misc_feature 18: /note="The nucleotide in position 18 and the nucleotide in position 19 are linked through a phosphodiester linkage"
  misc_feature 19: /note="A is a 2'-O-Methyladenosine (mA)"
  misc_feature 19: /note="The nucleotide in position 19 and the nucleotide in position 18 are linked through a phosphodiester linkage"
  misc_feature 19: /note="The nucleotide in position 19 and the nucleotide in position 20 are linked through a phosphorothioate linkage"
  misc_feature 20: /note="A is a locked adenine (lA)"
  misc_feature 20: /note="The nucleotide in position 20 and the nucleotide in position 19 are linked through a phosphorothioate linkage"
  misc_feature 20: /note="The nucleotide in position 20 and the nucleotide in position 21 are linked through a phosphorothioate linkage"
  misc_feature 21: /note="A is a locked adenine (lA)"
  misc_feature 21: /note="The nucleotide in position 21 and the nucleotide in position 20 are linked through a phosphorothioate linkage"
auuuuaaaaagucaccauaaa

SEQ ID NO: 596 - RNA, 21 nt, Artificial Sequence
  as C027.001#17; #26; #45; #54
  misc_feature 1: /note="A is a 2'-O-Methyladenosine (mA)"
  misc_feature 1: /note="The nucleotide in position 1 and the nucleotide in position 2 are linked through a phosphorothioate linkage"
  misc_feature 2: /note="U is a 2'-fluoro-uridine (fU)"
  misc_feature 2: /note="The nucleotide in position 2 and the nucleotide in position 1 are linked through a phosphorothioate linkage"
  misc_feature 2: /note="The nucleotide in position 2 and the nucleotide in position 3 are linked through a phosphorothioate linkage"
  misc_feature 3: /note="U is a 2'-O-Methyluridine (mU)"
  misc_feature 3: /note="The nucleotide in position 3 and the nucleotide in position 2 are linked through a phosphorothioate linkage"
  misc_feature 3: /note="The nucleotide in position 3 and the nucleotide in position 4 are linked through a phosphodiester linkage"
  misc_feature 4: /note="U is a 2'-O-Methyluridine (mU)"
  misc_feature 4: /note="The nucleotide in position 4 and the nucleotide in position 3 are linked through a phosphodiester linkage"
  misc_feature 4: /note="The nucleotide in position 4 and the nucleotide in position 5 are linked through a phosphodiester linkage"
  misc_feature 5: /note="U is a 2'-O-Methyluridine (mU)"
  misc_feature 5: /note="The nucleotide in position 5 and the nucleotide in position 4 are linked through a phosphodiester linkage"
  misc_feature 5: /note="The nucleotide in position 5 and the nucleotide in position 6 are linked through a phosphodiester linkage"
  misc_feature 6: /note="A is a 2'-fluoro-adenosine (fA)"
  misc_feature 6: /note="The nucleotide in position 6 and the nucleotide in position 5 are linked through a phosphodiester linkage"
  misc_feature 6: /note="The nucleotide in position 6 and the nucleotide in position 7 are linked through a phosphodiester linkage"
  misc_feature 7: /note="A is a 2'-O-Methyladenosine (mA)"
  misc_feature 7: /note="The nucleotide in position 7 and the nucleotide in position 6 are linked through a phosphodiester linkage"
  misc_feature 7: /note="The nucleotide in position 7 and the nucleotide in position 8 are linked through a phosphodiester linkage"
  misc_feature 8: /note="A is a 2'-O-Methyladenosine (mA)"
  misc_feature 8: /note="The nucleotide in position 8 and the nucleotide in position 7 are linked through a phosphodiester linkage"
  misc_feature 8: /note="The nucleotide in position 8 and the nucleotide in position 9 are linked through a phosphodiester linkage"
  misc_feature 9: /note="A is a 2'-O-Methyladenosine (mA)"
  misc_feature 9: /note="The nucleotide in position 9 and the nucleotide in position 8 are linked through a phosphodiester linkage"
  misc_feature 9: /note="The nucleotide in position 9 and the nucleotide in position 10 are linked through a phosphodiester linkage"
  misc_feature 10: /note="A is a 2'-O-Methyladenosine (mA)"
  misc_feature 10: /note="The nucleotide in position 10 and the nucleotide in position 9 are linked through a phosphodiester linkage"
  misc_feature 10: /note="The nucleotide in position 10 and the nucleotide in position 11 are linked through a phosphodiester linkage"
  misc_feature 11: /note="G is a 2'-O-Methylguanosine (mG)"
  misc_feature 11: /note="The nucleotide in position 11 and the nucleotide in position 10 are linked through a phosphodiester linkage"
  misc_feature 11: /note="The nucleotide in position 11 and the nucleotide in position 12 are linked through a phosphodiester linkage"
  misc_feature 12: /note="U is a 2'-O-Methyluridine (mU)"
  misc_feature 12: /note="The nucleotide in position 12 and the nucleotide in position 11 are linked through a phosphodiester linkage"
  misc_feature 12: /note="The nucleotide in position 12 and the nucleotide in position 13 are linked through a phosphodiester linkage"
  misc_feature 13: /note="C is a 2'-O-Methylcytidine (mC)"
  misc_feature 13: /note="The nucleotide in position 13 and the nucleotide in position 12 are linked through a phosphodiester linkage"
  misc_feature 13: /note="The nucleotide in position 13 and the nucleotide in position 14 are linked through a phosphodiester linkage"
  misc_feature 14: /note="A is a 2'-fluoro-adenosine (fA)"
  misc_feature 14: /note="The nucleotide in position 14 and the nucleotide in position 13 are linked through a phosphodiester linkage"
  misc_feature 14: /note="The nucleotide in position 14 and the nucleotide in position 15 are linked through a phosphodiester linkage"
  misc_feature 15: /note="C is a 2'-O-Methylcytidine (mC)"
  misc_feature 15: /note="The nucleotide in position 15 and the nucleotide in position 14 are linked through a phosphodiester linkage"
  misc_feature 15: /note="The nucleotide in position 15 and the nucleotide in position 16 are linked through a phosphodiester linkage"
  misc_feature 16: /note="C is a 2'-fluoro-cytidine (fC)"
  misc_feature 16: /note="The nucleotide in position 16 and the nucleotide in position 15 are linked through a phosphodiester linkage"
  misc_feature 16: /note="The nucleotide in position 16 and the nucleotide in position 17 are linked through a phosphodiester linkage"
  misc_feature 17: /note="A is a 2'-O-Methyladenosine (mA)"
  misc_feature 17: /note="The nucleotide in position 17 and the nucleotide in position 16 are linked through a phosphodiester linkage"
  misc_feature 17: /note="The nucleotide in position 17 and the nucleotide in position 18 are linked through a phosphodiester linkage"
  misc_feature 18: /note="U is a 2'-O-Methyluridine (mU)"
  misc_feature 18: /note="The nucleotide in position 18 and the nucleotide in position 17 are linked through a phosphodiester linkage"
  misc_feature 18: /note="The nucleotide in position 18 and the nucleotide in position 19 are linked through a phosphodiester linkage"
  misc_feature 19: /note="A is a 2'-O-Methyladenosine (mA)"
  misc_feature 19: /note="The nucleotide in position 19 and the nucleotide in position 18 are linked through a phosphodiester linkage"
  misc_feature 19: /note="The nucleotide in position 19 and the nucleotide in position 20 are linked through a phosphorothioate linkage"
  misc_feature 20: /note="A is a locked adenine (lA)"
  misc_feature 20: /note="The nucleotide in position 20 and the nucleotide in position 19 are linked through a phosphorothioate linkage"
  misc_feature 20: /note="The nucleotide in position 20 and the nucleotide in position 21 are linked through a phosphorothioate linkage"
  misc_feature 21: /note="A is a locked adenine (lA)"
  misc_feature 21: /note="The nucleotide in position 21 and the nucleotide in position 20 are linked through a phosphorothioate linkage"
auuuuaaaaagucaccauaaa

SEQ ID NO: 597 - RNA, 21 nt, Artificial Sequence
  as C027.001#18; #27; #46; #55
  misc_feature 1: /note="A is a 2'-O-Methyladenosine (mA)"
  misc_feature 1: /note="The nucleotide in position 1 and the nucleotide in position 2 are linked through a phosphorothioate linkage"
  misc_feature 2: /note="U is a 2'-fluoro-uridine (fU)"
  misc_feature 2: /note="The nucleotide in position 2 and the nucleotide in position 1 are linked through a phosphorothioate linkage"
  misc_feature 2: /note="The nucleotide in position 2 and the nucleotide in position 3 are linked through a phosphorothioate linkage"
  misc_feature 3: /note="U is a 2'-O-Methyluridine (mU)"
  misc_feature 3: /note="The nucleotide in position 3 and the nucleotide in position 2 are linked through a phosphorothioate linkage"
  misc_feature 3: /note="The nucleotide in position 3 and the nucleotide in position 4 are linked through a phosphodiester linkage"
  misc_feature 4: /note="U is a 2'-fluoro-uridine (fU)"
  misc_feature 4: /note="The nucleotide in position 4 and the nucleotide in position 3 are linked through a phosphodiester linkage"
  misc_feature 4: /note="The nucleotide in position 4 and the nucleotide in position 5 are linked through a phosphodiester linkage"
  misc_feature 5: /note="U is a 2'-O-Methyluridine (mU)"
  misc_feature 5: /note="The nucleotide in position 5 and the nucleotide in position 4 are linked through a phosphodiester linkage"
  misc_feature 5: /note="The nucleotide in position 5 and the nucleotide in position 6 are linked through a phosphodiester linkage"
  misc_feature 6: /note="A is a 2'-O-Methyladenosine (mA)"
  misc_feature 6: /note="The nucleotide in position 6 and the nucleotide in position 5 are linked through a phosphodiester linkage"
  misc_feature 6: /note="The nucleotide in position 6 and the nucleotide in position 7 are linked through a phosphodiester linkage"
  misc_feature 7: /note="A is a 2'-O-Methyladenosine (mA)"
  misc_feature 7: /note="The nucleotide in position 7 and the nucleotide in position 6 are linked through a phosphodiester linkage"
  misc_feature 7: /note="The nucleotide in position 7 and the nucleotide in position 8 are linked through a phosphodiester linkage"
  misc_feature 8: /note="A is a 2'-fluoro-adenosine (fA)"
  misc_feature 8: /note="The nucleotide in position 8 and the nucleotide in position 7 are linked through a phosphodiester linkage"
  misc_feature 8: /note="The nucleotide in position 8 and the nucleotide in position 9 are linked through a phosphodiester linkage"
  misc_feature 9: /note="A is a 2'-fluoro-adenosine (fA)"
  misc_feature 9: /note="The nucleotide in position 9 and the nucleotide in position 8 are linked through a phosphodiester linkage"
  misc_feature 9: /note="The nucleotide in position 9 and the nucleotide in position 10 are linked through a phosphodiester linkage"
  misc_feature 10: /note="A is a 2'-O-Methyladenosine (mA)"
  misc_feature 10: /note="The nucleotide in position 10 and the nucleotide in position 9 are linked through a phosphodiester linkage"
  misc_feature 10: /note="The nucleotide in position 10 and the nucleotide in position 11 are linked through a phosphodiester linkage"
  misc_feature 11: /note="G is a 2'-O-Methylguanosine (mG)"
  misc_feature 11: /note="The nucleotide in position 11 and the nucleotide in position 10 are linked through a phosphodiester linkage"
  misc_feature 11: /note="The nucleotide in position 11 and the nucleotide in position 12 are linked through a phosphodiester linkage"
  misc_feature 12: /note="U is a 2'-O-Methyluridine (mU)"
  misc_feature 12: /note="The nucleotide in position 12 and the nucleotide in position 11 are linked through a phosphodiester linkage"
  misc_feature 12: /note="The nucleotide in position 12 and the nucleotide in position 13 are linked through a phosphodiester linkage"
  misc_feature 13: /note="C is a 2'-O-Methylcytidine (mC)"
  misc_feature 13: /note="The nucleotide in position 13 and the nucleotide in position 12 are linked through a phosphodiester linkage"
  misc_feature 13: /note="The nucleotide in position 13 and the nucleotide in position 14 are linked through a phosphodiester linkage"
  misc_feature 14: /note="A is a 2'-fluoro-adenosine (fA)"
  misc_feature 14: /note="The nucleotide in position 14 and the nucleotide in position 13 are linked through a phosphodiester linkage"
  misc_feature 14: /note="The nucleotide in position 14 and the nucleotide in position 15 are linked through a phosphodiester linkage"
  misc_feature 15: /note="C is a 2'-O-Methylcytidine (mC)"
  misc_feature 15: /note="The nucleotide in position 15 and the nucleotide in position 14 are linked through a phosphodiester linkage"
  misc_feature 15: /note="The nucleotide in position 15 and the nucleotide in position 16 are linked through a phosphodiester linkage"
  misc_feature 16: /note="C is a 2'-fluoro-cytidine (fC)"
  misc_feature 16: /note="The nucleotide in position 16 and the nucleotide in position 15 are linked through a phosphodiester linkage"
  misc_feature 16: /note="The nucleotide in position 16 and the nucleotide in position 17 are linked through a phosphodiester linkage"
  misc_feature 17: /note="A is a 2'-O-Methyladenosine (mA)"
  misc_feature 17: /note="The nucleotide in position 17 and the nucleotide in position 16 are linked through a phosphodiester linkage"
  misc_feature 17: /note="The nucleotide in position 17 and the nucleotide in position 18 are linked through a phosphodiester linkage"
  misc_feature 18: /note="U is a 2'-O-Methyluridine (mU)"
  misc_feature 18: /note="The nucleotide in position 18 and the nucleotide in position 17 are linked through a phosphodiester linkage"
  misc_feature 18: /note="The nucleotide in position 18 and the nucleotide in position 19 are linked through a phosphodiester linkage"
  misc_feature 19: /note="A is a 2'-O-Methyladenosine (mA)"
  misc_feature 19: /note="The nucleotide in position 19 and the nucleotide in position 18 are linked through a phosphodiester linkage"
  misc_feature 19: /note="The nucleotide in position 19 and the nucleotide in position 20 are linked through a phosphorothioate linkage"
  misc_feature 20: /note="A is a locked adenine (lA)"
  misc_feature 20: /note="The nucleotide in position 20 and the nucleotide in position 19 are linked through a phosphorothioate linkage"
  misc_feature 20: /note="The nucleotide in position 20 and the nucleotide in position 21 are linked through a phosphorothioate linkage"
  misc_feature 21: /note="A is a locked adenine (lA)"
  misc_feature 21: /note="The nucleotide in position 21 and the nucleotide in position 20 are linked through a phosphorothioate linkage"
auuuuaaaaagucaccauaaa

SEQ ID NO: 598 - RNA, 21 nt, Artificial Sequence
  as C027.001#19; #28; #47; #56
  misc_feature 1: /note="A is a 2'-O-Methyladenosine (mA)"
  misc_feature 1: /note="The nucleotide in position 1 and the nucleotide in position 2 are linked through a phosphorothioate linkage"
  misc_feature 2: /note="U is a 2'-fluoro-uridine (fU)"
  misc_feature 2: /note="The nucleotide in position 2 and the nucleotide in position 1 are linked through a phosphorothioate linkage"
  misc_feature 2: /note="The nucleotide in position 2 and the nucleotide in position 3 are linked through a phosphorothioate linkage"
  misc_feature 3: /note="U is a 2'-O-Methyluridine (mU)"
  misc_feature 3: /note="The nucleotide in position 3 and the nucleotide in position 2 are linked through a phosphorothioate linkage"
  misc_feature 3: /note="The nucleotide in position 3 and the nucleotide in position 4 are linked through a phosphodiester linkage"
  misc_feature 4: /note="U is a 2'-fluoro-uridine (fU)"
  misc_feature 4: /note="The nucleotide in position 4 and the nucleotide in position 3 are linked through a phosphodiester linkage"
  misc_feature 4: /note="The nucleotide in position 4 and the nucleotide in position 5 are linked through a phosphodiester linkage"
  misc_feature 5: /note="U is a 2'-O-Methyluridine (mU)"
  misc_feature 5: /note="The nucleotide in position 5 and the nucleotide in position 4 are linked through a phosphodiester linkage"
  misc_feature 5: /note="The nucleotide in position 5 and the nucleotide in position 6 are linked through a phosphodiester linkage"
  misc_feature 6: /note="A is a 2'-O-Methyladenosine (mA)"
  misc_feature 6: /note="The nucleotide in position 6 and the nucleotide in position 5 are linked through a phosphodiester linkage"
  misc_feature 6: /note="The nucleotide in position 6 and the nucleotide in position 7 are linked through a phosphodiester linkage"
  misc_feature 7: /note="A is a 2'-O-Methyladenosine (mA)"
  misc_feature 7: /note="The nucleotide in position 7 and the nucleotide in position 6 are linked through a phosphodiester linkage"
  misc_feature 7: /note="The nucleotide in position 7 and the nucleotide in position 8 are linked through a phosphodiester linkage"
  misc_feature 8: /note="A is a 2'-O-Methyladenosine (mA)"
  misc_feature 8: /note="The nucleotide in position 8 and the nucleotide in position 7 are linked through a phosphodiester linkage"
  misc_feature 8: /note="The nucleotide in position 8 and the nucleotide in position 9 are linked through a phosphodiester linkage"
  misc_feature 9: /note="A is a 2'-fluoro-adenosine (fA)"
  misc_feature 9: /note="The nucleotide in position 9 and the nucleotide in position 8 are linked through a phosphodiester linkage"
  misc_feature 9: /note="The nucleotide in position 9 and the nucleotide in position 10 are linked through a phosphodiester linkage"
  misc_feature 10: /note="A is a 2'-O-Methyladenosine (mA)"
  misc_feature 10: /note="The nucleotide in position 10 and the nucleotide in position 9 are linked through a phosphodiester linkage"
  misc_feature 10: /note="The nucleotide in position 10 and the nucleotide in position 11 are linked through a phosphodiester linkage"
  misc_feature 11: /note="G is a 2'-O-Methylguanosine (mG)"
  misc_feature 11: /note="The nucleotide in position 11 and the nucleotide in position 10 are linked through a phosphodiester linkage"
  misc_feature 11: /note="The nucleotide in position 11 and the nucleotide in position 12 are linked through a phosphodiester linkage"
  misc_feature 12: /note="U is a 2'-O-Methyluridine (mU)"
  misc_feature 12: /note="The nucleotide in position 12 and the nucleotide in position 11 are linked through a phosphodiester linkage"
  misc_feature 12: /note="The nucleotide in position 12 and the nucleotide in position 13 are linked through a phosphodiester linkage"
  misc_feature 13: /note="C is a 2'-O-Methylcytidine (mC)"
  misc_feature 13: /note="The nucleotide in position 13 and the nucleotide in position 12 are linked through a phosphodiester linkage"
  misc_feature 13: /note="The nucleotide in position 13 and the nucleotide in position 14 are linked through a phosphodiester linkage"
  misc_feature 14: /note="A is a 2'-fluoro-adenosine (fA)"
  misc_feature 14: /note="The nucleotide in position 14 and the nucleotide in position 13 are linked through a phosphodiester linkage"
  misc_feature 14: /note="The nucleotide in position 14 and the nucleotide in position 15 are linked through a phosphodiester linkage"
  misc_feature 15: /note="C is a 2'-O-Methylcytidine (mC)"
  misc_feature 15: /note="The nucleotide in position 15 and the nucleotide in position 14 are linked through a phosphodiester linkage"
  misc_feature 15: /note="The nucleotide in position 15 and the nucleotide in position 16 are linked through a phosphodiester linkage"
  misc_feature 16: /note="C is a 2'-fluoro-cytidine (fC)"
  misc_feature 16: /note="The nucleotide in position 16 and the nucleotide in position 15 are linked through a phosphodiester linkage"
  misc_feature 16: /note="The nucleotide in position 16 and the nucleotide in position 17 are linked through a phosphodiester linkage"
  misc_feature 17: /note="A is a 2'-O-Methyladenosine (mA)"
  misc_feature 17: /note="The nucleotide in position 17 and the nucleotide in position 16 are linked through a phosphodiester linkage"
  misc_feature 17: /note="The nucleotide in position 17 and the nucleotide in position 18 are linked through a phosphodiester linkage"
  misc_feature 18: /note="U is a 2'-O-Methyluridine (mU)"
  misc_feature 18: /note="The nucleotide in position 18 and the nucleotide in position 17 are linked through a phosphodiester linkage"
  misc_feature 18: /note="The nucleotide in position 18 and the nucleotide in position 19 are linked through a phosphodiester linkage"
  misc_feature 19: /note="A is a 2'-O-Methyladenosine (mA)"
  misc_feature 19: /note="The nucleotide in position 19 and the nucleotide in position 18 are linked through a phosphodiester linkage"
  misc_feature 19: /note="The nucleotide in position 19 and the nucleotide in position 20 are linked through a phosphorothioate linkage"
  misc_feature 20: /note="A is a locked adenine (lA)"
  misc_feature 20: /note="The nucleotide in position 20 and the nucleotide in position 19 are linked through a phosphorothioate linkage"
  misc_feature 20: /note="The nucleotide in position 20 and the nucleotide in position 21 are linked through a phosphorothioate linkage"
  misc_feature 21: /note="A is a locked adenine (lA)"
  misc_feature 21: /note="The nucleotide in position 21 and the nucleotide in position 20 are linked through a phosphorothioate linkage"
auuuuaaaaagucaccauaaa

SEQ ID NO: 599 - RNA, 22 nt, Artificial Sequence
  Forward C027.002
  misc_feature 1: /note="T is a lgT3 nucleotide analog"
  misc_feature 1: /note="The nucleotide in position 1 and the nucleotide in position 2 are linked through a phosphodiester linkage"
  misc_feature 2: /note="T is a lgT3 nucleotide analog"
  misc_feature 2: /note="The nucleotide in position 2 and the nucleotide in position 1 are linked through a phosphodiester linkage"
  misc_feature 2: /note="The nucleotide in position 2 and the nucleotide in position 3 are linked through a phosphodiester linkage"
  misc_feature 3: /note="T is a lgT3 nucleotide analog"
  misc_feature 3: /note="The nucleotide in position 3 and the nucleotide in position 2 are linked through a phosphodiester linkage"
  misc_feature 3: /note="The nucleotide in position 3 and the nucleotide in position 4 are linked through a phosphodiester linkage"
  misc_feature 4: /note="The nucleotide in position 4 and the nucleotide in position 3 are linked through a phosphodiester linkage"
  misc_feature 4: /note="The nucleotide in position 4 and the nucleotide in position 5 are linked through a phosphodiester linkage"
  misc_feature 4: /note="G is a 2'-fluoro-guanosine (fG)"
  misc_feature 5: /note="C is a 2'-O-Methylcytidine (mC)"
  misc_feature 5: /note="The nucleotide in position 5 and the nucleotide in position 4 are linked through a phosphodiester linkage"
  misc_feature 5: /note="The nucleotide in position 5 and the nucleotide in position 6 are linked through a phosphodiester linkage"
  misc_feature 6: /note="The nucleotide in position 6 and the nucleotide in position 5 are linked through a phosphodiester linkage"
  misc_feature 6: /note="The nucleotide in position 6 and the nucleotide in position 7 are linked through a phosphodiester linkage"
  misc_feature 6: /note="A is a 2'-fluoro-adenosine (fA)"
  misc_feature 7: /note="The nucleotide in position 7 and the nucleotide in position 6 are linked through a phosphodiester linkage"
  misc_feature 7: /note="The nucleotide in position 7 and the nucleotide in position 8 are linked through a phosphodiester linkage"
  misc_feature 7: /note="U is a 2'-O-Methyluridine (mU)"
  misc_feature 8: /note="The nucleotide in position 8 and the nucleotide in position 7 are linked through a phosphodiester linkage"
  misc_feature 8: /note="The nucleotide in position 8 and the nucleotide in position 9 are linked through a phosphodiester linkage"
  misc_feature 8: /note="U is a 2'-fluoro-uridine (fU)"
  misc_feature 9: /note="The nucleotide in position 9 and the nucleotide in position 8 are linked through a phosphodiester linkage"
  misc_feature 9: /note="The nucleotide in position 9 and the nucleotide in position 10 are linked through a phosphodiester linkage"
  misc_feature 9: /note="U is a 2'-O-Methyluridine (mU)"
  misc_feature 10: /note="The nucleotide in position 10 and the nucleotide in position 9 are linked through a phosphodiester linkage"
  misc_feature 10: /note="The nucleotide in position 10 and the nucleotide in position 11 are linked through a phosphodiester linkage"
  misc_feature 10: /note="U is a 2'-fluoro-uridine (fU)"
  misc_feature 11: /note="The nucleotide in position 11 and the nucleotide in position 12 are linked through a phosphodiester linkage"
  misc_feature 11: /note="The nucleotide in position 11 and the nucleotide in position 10 are linked through a phosphodiester linkage"
  misc_feature 11: /note="U is a 2'-O-Methyluridine (mU)"
  misc_feature 12: /note="The nucleotide in position 12 and the nucleotide in position 13 are linked through a phosphodiester linkage"
  misc_feature 12: /note="The nucleotide in position 12 and the nucleotide in position 11 are linked through a phosphodiester linkage"
  misc_feature 12: /note="A is a 2'-fluoro-adenosine (fA)"
  misc_feature 13: /note="The nucleotide in position 13 and the nucleotide in position 14 are linked through a phosphodiester linkage"
  misc_feature 13: /note="The nucleotide in position 13 and the nucleotide in position 12 are linked through a phosphodiester linkage"
  misc_feature 13: /note="U is a 2'-O-Methyluridine (mU)"
  misc_feature 14: /note="The nucleotide in position 14 and the nucleotide in position 15 are linked through a phosphodiester linkage"
  misc_feature 14: /note="The nucleotide in position 14 and the nucleotide in position 13 are linked through a phosphodiester linkage"
  misc_feature 14: /note="U is a 2'-fluoro-uridine (fU)"
  misc_feature 15: /note="The nucleotide in position 15 and the nucleotide in position 16 are linked through a phosphodiester linkage"
  misc_feature 15: /note="The nucleotide in position 15 and the nucleotide in position 14 are linked through a phosphodiester linkage"
  misc_feature 15: /note="A is a 2'-O-Methyladenosine (mA)"
  misc_feature 16: /note="The nucleotide in position 16 and the nucleotide in position 17 are linked through a phosphodiester linkage"
  misc_feature 16: /note="The nucleotide in position 16 and the nucleotide in position 15 are linked through a phosphodiester linkage"
  misc_feature 16: /note="A is a 2'-fluoro-adenosine (fA)"
  misc_feature 17: /note="The nucleotide in position 17 and the nucleotide in position 18 are linked through a phosphodiester linkage"
  misc_feature 17: /note="The nucleotide in position 17 and the nucleotide in position 16 are linked through a phosphodiester linkage"
  misc_feature 17: /note="U is a 2'-O-Methyluridine (mU)"
  misc_feature 18: /note="The nucleotide in position 18 and the nucleotide in position 19 are linked through a phosphodiester linkage"
  misc_feature 18: /note="The nucleotide in position 18 and the nucleotide in position 17 are linked through a phosphodiester linkage"
  misc_feature 18: /note="A is a 2'-fluoro-adenosine (fA)"
  misc_feature 19: /note="The nucleotide in position 19 and the nucleotide in position 20 are linked through a phosphodiester linkage"
  misc_feature 19: /note="The nucleotide in position 19 and the nucleotide in position 18 are linked through a phosphodiester linkage"
  misc_feature 19: /note="U is a 2'-O-Methyluridine (mU)"
  misc_feature 20: /note="The nucleotide in position 20 and the nucleotide in position 19 are linked through a phosphodiester linkage"
  misc_feature 20: /note="The nucleotide in position 20 and the nucleotide in position 21 are linked through a phosphorothioate linkage"
  misc_feature 20: /note="G is a 2'-fluoro-guanosine (fG)"
  misc_feature 21: /note="The nucleotide in position 21 and the nucleotide in position 20 are linked through a phosphorothioate linkage"
  misc_feature 21: /note="G is a 2'-O-Methylguanosine (mG)"
  misc_feature 21: /note="The nucleotide in position 21 and the nucleotide in position 22 are linked through a phosphorothioate linkage"
  misc_feature 22: /note="U is a 2'-fluoro-uridine (fU)"
  misc_feature 22: /note="The nucleotide in position 22 and the nucleotide in position 21 are linked through a phosphorothioate linkage"
tttgcauuuuuauuaauauggu

SEQ ID NO: 600 - RNA, 22 nt, Artificial Sequence
  forward C027.002#01; #02; #03; #04; #05
  misc_feature 1: /note="T is a lgT3 nucleotide analog"
  misc_feature 1: /note="The nucleotide in position 1 and the nucleotide in position 2 are linked through a phosphodiester linkage"
  misc_feature 2: /note="T is a lgT3 nucleotide analog"
  misc_feature 2: /note="The nucleotide in position 2 and the nucleotide in position 1 are linked through a phosphodiester linkage"
  misc_feature 2: /note="The nucleotide in position 2 and the nucleotide in position 3 are linked through a phosphodiester linkage"
  misc_feature 3: /note="T is a lgT3 nucleotide analog"
  misc_feature 3: /note="The nucleotide in position 3 and the nucleotide in position 2 are linked through a phosphodiester linkage"
  misc_feature 3: /note="The nucleotide in position 3 and the nucleotide in position 4 are linked through a phosphodiester linkage"
  misc_feature 4: /note="The nucleotide in position 4 and the nucleotide in position 3 are linked through a phosphodiester linkage"
  misc_feature 4: /note="The nucleotide in position 4 and the nucleotide in position 5 are linked through a phosphodiester linkage"
  misc_feature 4: /note="G is a 2'-O-Methylguanosine (mG)"
  misc_feature 5: /note="C is a 2'-O-Methylcytidine (mC)"
  misc_feature 5: /note="The nucleotide in position 5 and the nucleotide in position 4 are linked through a phosphodiester linkage"
  misc_feature 5: /note="The nucleotide in position 5 and the nucleotide in position 6 are linked through a phosphodiester linkage"
  misc_feature 6: /note="The nucleotide in position 6 and the nucleotide in position 5 are linked through a phosphodiester linkage"
  misc_feature 6: /note="The nucleotide in position 6 and the nucleotide in position 7 are linked through a phosphodiester linkage"
  misc_feature 6: /note="A is a 2'-O-Methyladenosine (mA)"
  misc_feature 7: /note="The nucleotide in position 7 and the nucleotide in position 6 are linked through a phosphodiester linkage"
  misc_feature 7: /note="The nucleotide in position 7 and the nucleotide in position 8 are linked through a phosphodiester linkage"
  misc_feature 7: /note="U is a 2'-O-Methyluridine (mU)"
  misc_feature 8: /note="The nucleotide in position 8 and the nucleotide in position 7 are linked through a phosphodiester linkage"
  misc_feature 8: /note="The nucleotide in position 8 and the nucleotide in position 9 are linked through a phosphodiester linkage"
  misc_feature 8: /note="U is a 2'-fluoro-uridine (fU)"
  misc_feature 9: /note="The nucleotide in position 9 and the nucleotide in position 8 are linked through a phosphodiester linkage"
  misc_feature 9: /note="The nucleotide in position 9 and the nucleotide in position 10 are linked through a phosphodiester linkage"
  misc_feature 9: /note="U is a 2'-O-Methyluridine (mU)"
  misc_feature 10: /note="The nucleotide in position 10 and the nucleotide in position 9 are linked through a phosphodiester linkage"
  misc_feature 10: /note="The nucleotide in position 10 and the nucleotide in position 11 are linked through a phosphodiester linkage"
  misc_feature 10: /note="U is a 2'-fluoro-uridine (fU)"
  misc_feature 11: /note="The nucleotide in position 11 and the nucleotide in position 12 are linked through a phosphodiester linkage"
  misc_feature 11: /note="The nucleotide in position 11 and the nucleotide in position 10 are linked through a phosphodiester linkage"
  misc_feature 11: /note="U is a 2'-fluoro-uridine (fU)"
  misc_feature 12: /note="The nucleotide in position 12 and the nucleotide in position 13 are linked through a phosphodiester linkage"
  misc_feature 12: /note="The nucleotide in position 12 and the nucleotide in position 11 are linked through a phosphodiester linkage"
  misc_feature 12: /note="A is a 2'-fluoro-adenosine (fA)"
  misc_feature 13: /note="The nucleotide in position 13 and the nucleotide in position 14 are linked through a phosphodiester linkage"
  misc_feature 13: /note="The nucleotide in position 13 and the nucleotide in position 12 are linked through a phosphodiester linkage"
  misc_feature 13: /note="U is a 2'-O-Methyluridine (mU)"
  misc_feature 14: /note="The nucleotide in position 14 and the nucleotide in position 15 are linked through a phosphodiester linkage"
  misc_feature 14: /note="The nucleotide in position 14 and the nucleotide in position 13 are linked through a phosphodiester linkage"
  misc_feature 14: /note="U is a 2'-O-Methyluridine (mU)"
  misc_feature 15: /note="The nucleotide in position 15 and the nucleotide in position 16 are linked through a phosphodiester linkage"
  misc_feature 15: /note="The nucleotide in position 15 and the nucleotide in position 14 are linked through a phosphodiester linkage"
  misc_feature 15: /note="A is a 2'-O-Methyladenosine (mA)"
  misc_feature 16: /note="The nucleotide in position 16 and the nucleotide in position 17 are linked through a phosphodiester linkage"
  misc_feature 16: /note="The nucleotide in position 16 and the nucleotide in position 15 are linked through a phosphodiester linkage"
  misc_feature 16: /note="A is a 2'-O-Methyladenosine (mA)"
  misc_feature 17: /note="The nucleotide in position 17 and the nucleotide in position 18 are linked through a phosphodiester linkage"
  misc_feature 17: /note="The nucleotide in position 17 and the nucleotide in position 16 are linked through a phosphodiester linkage"
  misc_feature 17: /note="U is a 2'-O-Methyluridine (mU)"
  misc_feature 18: /note="The nucleotide in position 18 and the nucleotide in position 19 are linked through a phosphodiester linkage"
  misc_feature 18: /note="The nucleotide in position 18 and the nucleotide in position 17 are linked through a phosphodiester linkage"
  misc_feature 18: /note="A is a 2'-O-Methyladenosine (mA)"
  misc_feature 19: /note="The nucleotide in position 19 and the nucleotide in position 20 are linked through a phosphodiester linkage"
  misc_feature 19: /note="The nucleotide in position 19 and the nucleotide in position 18 are linked through a phosphodiester linkage"
  misc_feature 19: /note="U is a 2'-O-Methyluridine (mU)"
  misc_feature 20: /note="The nucleotide in position 20 and the nucleotide in position 19 are linked through a phosphodiester linkage"
  misc_feature 20: /note="The nucleotide in position 20 and the nucleotide in position 21 are linked through a phosphorothioate linkage"
  misc_feature 20: /note="G is a 2'-O-Methylguanosine (mG)"
  misc_feature 21: /note="The nucleotide in position 21 and the nucleotide in position 20 are linked through a phosphorothioate linkage"
  misc_feature 21: /note="G is a 2'-O-Methylguanosine (mG)"
  misc_feature 21: /note="The nucleotide in position 21 and the nucleotide in position 22 are linked through a phosphorothioate linkage"
  misc_feature 22: /note="U is a 2'-O-Methyluridine (mU)"
  misc_feature 22: /note="The nucleotide in position 22 and the nucleotide in position 21 are linked through a phosphorothioate linkage"
tttgcauuuuuauuaauauggu

SEQ ID NO: 601 - RNA, 22 nt, Artificial Sequence
  forward C027.002#06; #07; #08; #09; #10
  misc_feature 1: /note="T is a lgT3 nucleotide analog"
  misc_feature 1: /note="The nucleotide in position 1 and the nucleotide in position 2 are linked through a phosphodiester linkage"
  misc_feature 2: /note="T is a lgT3 nucleotide analog"
  misc_feature 2: /note="The nucleotide in position 2 and the nucleotide in position 1 are linked through a phosphodiester linkage"
  misc_feature 2: /note="The nucleotide in position 2 and the nucleotide in position 3 are linked through a phosphodiester linkage"
  misc_feature 3: /note="T is a lgT3 nucleotide analog"
  misc_feature 3: /note="The nucleotide in position 3 and the nucleotide in position 2 are linked through a phosphodiester linkage"
  misc_feature 3: /note="The nucleotide in position 3 and the nucleotide in position 4 are linked through a phosphodiester linkage"
  misc_feature 4: /note="The nucleotide in position 4 and the nucleotide in position 3 are linked through a phosphodiester linkage"
  misc_feature 4: /note="The nucleotide in position 4 and the nucleotide in position 5 are linked through a phosphodiester linkage"
  misc_feature 4: /note="G is a locked guanine (lG)"
  misc_feature 5: /note="C is a locked cytosine (lC)"
  misc_feature 5: /note="The nucleotide in position 5 and the nucleotide in position 4 are linked through a phosphodiester linkage"
  misc_feature 5: /note="The nucleotide in position 5 and the nucleotide in position 6 are linked through a phosphodiester linkage"
  misc_feature 6: /note="The nucleotide in position 6 and the nucleotide in position 5 are linked through a phosphodiester linkage"
  misc_feature 6: /note="The nucleotide in position 6 and the nucleotide in position 7 are linked through a phosphodiester linkage"
  misc_feature 6: /note="A is a 2'-O-Methyladenosine (mA)"
  misc_feature 7: /note="The nucleotide in position 7 and the nucleotide in position 6 are linked through a phosphodiester linkage"
  misc_feature 7: /note="The nucleotide in position 7 and the nucleotide in position 8 are linked through a phosphodiester linkage"
  misc_feature 7: /note="U is a 2'-O-Methyluridine (mU)"
  misc_feature 8: /note="The nucleotide in position 8 and the nucleotide in position 7 are linked through a phosphodiester linkage"
  misc_feature 8: /note="The nucleotide in position 8 and the nucleotide in position 9 are linked through a phosphodiester linkage"
  misc_feature 8: /note="U is a 2'-fluoro-uridine (fU)"
  misc_feature 9: /note="The nucleotide in position 9 and the nucleotide in position 8 are linked through a phosphodiester linkage"
  misc_feature 9: /note="The nucleotide in position 9 and the nucleotide in position 10 are linked through a phosphodiester linkage"
  misc_feature 9: /note="U is a 2'-O-Methyluridine (mU)"
  misc_feature 10: /note="The nucleotide in position 10 and the nucleotide in position 9 are linked through a phosphodiester linkage"
  misc_feature 10: /note="The nucleotide in position 10 and the nucleotide in position 11 are linked through a phosphodiester linkage"
  misc_feature 10: /note="U is a 2'-fluoro-uridine (fU)"
  misc_feature 11: /note="The nucleotide in position 11 and the nucleotide in position 12 are linked through a phosphodiester linkage"
  misc_feature 11: /note="The nucleotide in position 11 and the nucleotide in position 10 are linked through a phosphodiester linkage"
  misc_feature 11: /note="U is a 2'-fluoro-uridine (fU)"
  misc_feature 12: /note="The nucleotide in position 12 and the nucleotide in position 13 are linked through a phosphodiester linkage"
  misc_feature 12: /note="The nucleotide in position 12 and the nucleotide in position 11 are linked through a phosphodiester linkage"
  misc_feature 12: /note="A is a 2'-fluoro-adenosine (fA)"
  misc_feature 13: /note="The nucleotide in position 13 and the nucleotide in position 14 are linked through a phosphodiester linkage"
  misc_feature 13: /note="The nucleotide in position 13 and the nucleotide in position 12 are linked through a phosphodiester linkage"
  misc_feature 13: /note="U is a 2'-O-Methyluridine (mU)"
  misc_feature 14: /note="The nucleotide in position 14 and the nucleotide in position 15 are linked through a phosphodiester linkage"
  misc_feature 14: /note="The nucleotide in position 14 and the nucleotide in position 13 are linked through a phosphodiester linkage"
  misc_feature 14: /note="U is a 2'-O-Methyluridine (mU)"
  misc_feature 15: /note="The nucleotide in position 15 and the nucleotide in position 16 are linked through a phosphodiester linkage"
  misc_feature 15: /note="The nucleotide in position 15 and the nucleotide in position 14 are linked through a phosphodiester linkage"
  misc_feature 15: /note="A is a 2'-O-Methyladenosine (mA)"
  misc_feature 16: /note="The nucleotide in position 16 and the nucleotide in position 17 are linked through a phosphodiester linkage"
  misc_feature 16: /note="The nucleotide in position 16 and the nucleotide in position 15 are linked through a phosphodiester linkage"
  misc_feature 16: /note="A is a 2'-O-Methyladenosine (mA)"
  misc_feature 17: /note="The nucleotide in position 17 and the nucleotide in position 18 are linked through a phosphodiester linkage"
  misc_feature 17: /note="The nucleotide in position 17 and the nucleotide in position 16 are linked through a phosphodiester linkage"
  misc_feature 17: /note="U is a 2'-O-Methyluridine (mU)"
  misc_feature 18: /note="The nucleotide in position 18 and the nucleotide in position 19 are linked through a phosphodiester linkage"
  misc_feature 18: /note="The nucleotide in position 18 and the nucleotide in position 17 are linked through a phosphodiester linkage"
  misc_feature 18: /note="A is a 2'-O-Methyladenosine (mA)"
  misc_feature 19: /note="The nucleotide in position 19 and the nucleotide in position 20 are linked through a phosphodiester linkage"
  misc_feature 19: /note="The nucleotide in position 19 and the nucleotide in position 18 are linked through a phosphodiester linkage"
  misc_feature 19: /note="U is a 2'-O-Methyluridine (mU)"
  misc_feature 20: /note="The nucleotide in position 20 and the nucleotide in position 19 are linked through a phosphodiester linkage"
  misc_feature 20: /note="The nucleotide in position 20 and the nucleotide in position 21 are linked through a phosphorothioate linkage"
  misc_feature 20: /note="G is a 2'-O-Methylguanosine (mG)"
  misc_feature 21: /note="The nucleotide in position 21 and the nucleotide in position 20 are linked through a phosphorothioate linkage"
  misc_feature 21: /note="G is a 2'-O-Methylguanosine (mG)"
  misc_feature 21: /note="The nucleotide in position 21 and the nucleotide in position 22 are linked through a phosphorothioate linkage"
  misc_feature 22: /note="U is a 2'-O-Methyluridine (mU)"
  misc_feature 22: /note="The nucleotide in position 22 and the nucleotide in position 21 are linked through a phosphorothioate linkage"
tttgcauuuuuauuaauauggu

SEQ ID NO: 602 - RNA, 22 nt, Artificial Sequence
  forward C027.002#11; #12; #13; #14; #15; #16; #17; #18; #19
  misc_feature 1: /note="T is a lgT3 nucleotide analog"
  misc_feature 1: /note="The nucleotide in position 1 and the nucleotide in position 2 are linked through a phosphodiester linkage"
  misc_feature 2: /note="T is a lgT3 nucleotide analog"
  misc_feature 2: /note="The nucleotide in position 2 and the nucleotide in position 1 are linked through a phosphodiester linkage"
  misc_feature 2: /note="The nucleotide in position 2 and the nucleotide in position 3 are linked through a phosphodiester linkage"
  misc_feature 3: /note="T is a lgT3 nucleotide analog"
  misc_feature 3: /note="The nucleotide in position 3 and the nucleotide in position 2 are linked through a phosphodiester linkage"
  misc_feature 3: /note="The nucleotide in position 3 and the nucleotide in position 4 are linked through a phosphodiester linkage"
  misc_feature 4: /note="The nucleotide in position 4 and the nucleotide in position 3 are linked through a phosphodiester linkage"
  misc_feature 4: /note="The nucleotide in position 4 and the nucleotide in position 5 are linked through a phosphodiester linkage"
  misc_feature 4: /note="G is a 2'-O-Methylguanosine (mG)"
  misc_feature 5: /note="C is a 2'-O-Methylcytidine (mC)"
  misc_feature 5: /note="The nucleotide in position 5 and the nucleotide in position 4 are linked through a phosphodiester linkage"
  misc_feature 5: /note="The nucleotide in position 5 and the nucleotide in position 6 are linked through a phosphodiester linkage"
  misc_feature 6: /note="The nucleotide in position 6 and the nucleotide in position 5 are linked through a phosphodiester linkage"
  misc_feature 6: /note="The nucleotide in position 6 and the nucleotide in position 7 are linked through a phosphodiester linkage"
  misc_feature 6: /note="A is a 2'-O-Methyladenosine (mA)"
  misc_feature 7: /note="The nucleotide in position 7 and the nucleotide in position 6 are linked through a phosphodiester linkage"
  misc_feature 7: /note="The nucleotide in position 7 and the nucleotide in position 8 are linked through a phosphodiester linkage"
  misc_feature 7: /note="U is a 2'-O-Methyluridine (mU)"
  misc_feature 8: /note="The nucleotide in position 8 and the nucleotide in position 7 are linked through a phosphodiester linkage"
  misc_feature 8: /note="The nucleotide in position 8 and the nucleotide in position 9 are linked through a phosphodiester linkage"
  misc_feature 8: /note="U is a 2'-fluoro-uridine (fU)"
  misc_feature 9: /note="The nucleotide in position 9 and the nucleotide in position 8 are linked through a phosphodiester linkage"
  misc_feature 9: /note="The nucleotide in position 9 and the nucleotide in position 10 are linked through a phosphodiester linkage"
  misc_feature 9: /note="U is a 2'-O-Methyluridine (mU)"
  misc_feature 10: /note="The nucleotide in position 10 and the nucleotide in position 9 are linked through a phosphodiester linkage"
  misc_feature 10: /note="The nucleotide in position 10 and the nucleotide in position 11 are linked through a phosphodiester linkage"
  misc_feature 10: /note="U is a 2'-fluoro-uridine (fU)"
  misc_feature 11: /note="The nucleotide in position 11 and the nucleotide in position 12 are linked through a phosphodiester linkage"
  misc_feature 11: /note="The nucleotide in position 11 and the nucleotide in position 10 are linked through a phosphodiester linkage"
  misc_feature 11: /note="U is a 2'-fluoro-uridine (fU)"
  misc_feature 12: /note="The nucleotide in position 12 and the nucleotide in position 13 are linked through a phosphodiester linkage"
  misc_feature 12: /note="The nucleotide in position 12 and the nucleotide in position 11 are linked through a phosphodiester linkage"
  misc_feature 12: /note="A is a 2'-fluoro-adenosine (fA)"
  misc_feature 13: /note="The nucleotide in position 13 and the nucleotide in position 14 are linked through a phosphodiester linkage"
  misc_feature 13: /note="The nucleotide in position 13 and the nucleotide in position 12 are linked through a phosphodiester linkage"
  misc_feature 13: /note="U is a 2'-O-Methyluridine (mU)"
  misc_feature 14: /note="The nucleotide in position 14 and the nucleotide in position 15 are linked through a phosphodiester linkage"
  misc_feature 14: /note="The nucleotide in position 14 and the nucleotide in position 13 are linked through a phosphodiester linkage"
  misc_feature 14: /note="U is a 2'-O-Methyluridine (mU)"
  misc_feature 15: /note="The nucleotide in position 15 and the nucleotide in position 16 are linked through a phosphodiester linkage"
  misc_feature 15: /note="The nucleotide in position 15 and the nucleotide in position 14 are linked through a phosphodiester linkage"
  misc_feature 15: /note="A is a 2'-O-Methyladenosine (mA)"
  misc_feature 16: /note="The nucleotide in position 16 and the nucleotide in position 17 are linked through a phosphodiester linkage"
  misc_feature 16: /note="The nucleotide in position 16 and the nucleotide in position 15 are linked through a phosphodiester linkage"
  misc_feature 16: /note="A is a 2'-O-Methyladenosine (mA)"
  misc_feature 17: /note="The nucleotide in position 17 and the nucleotide in position 18 are linked through a phosphodiester linkage"
  misc_feature 17: /note="The nucleotide in position 17 and the nucleotide in position 16 are linked through a phosphodiester linkage"
  misc_feature 17: /note="U is a 2'-O-Methyluridine (mU)"
  misc_feature 18: /note="The nucleotide in position 18 and the nucleotide in position 19 are linked through a phosphodiester linkage"
  misc_feature 18: /note="The nucleotide in position 18 and the nucleotide in position 17 are linked through a phosphodiester linkage"
  misc_feature 18: /note="A is a 2'-O-Methyladenosine (mA)"
  misc_feature 19: /note="The nucleotide in position 19 and the nucleotide in position 20 are linked through a phosphodiester linkage"
  misc_feature 19: /note="The nucleotide in position 19 and the nucleotide in position 18 are linked through a phosphodiester linkage"
  misc_feature 19: /note="U is a 2'-O-Methyluridine (mU)"
  misc_feature 20: /note="The nucleotide in position 20 and the nucleotide in position 19 are linked through a phosphodiester linkage"
  misc_feature 20: /note="The nucleotide in position 20 and the nucleotide in position 21 are linked through a phosphodiester linkage"
  misc_feature 20: /note="G is a 2'-O-Methylguanosine (mG)"
  misc_feature 21: /note="The nucleotide in position 21 and the nucleotide in position 20 are linked through a phosphodiester linkage"
  misc_feature 21: /note="T is a LT4 nucleotide analog"
  misc_feature 21: /note="The nucleotide in position 21 and the nucleotide in position 22 are linked through a phosphodiester linkage"
  misc_feature 22: /note="T is a LT4 nucleotide analog"
  misc_feature 22: /note="The nucleotide in position 22 and the nucleotide in position 21 are linked through a phosphodiester linkage"
tttgcauuuuuauuaauaugtt

SEQ ID NO: 603 - RNA, 22 nt, Artificial Sequence
  forward C027.002#20; #21; #22; #23; #24; #25; #26; #27; #28
  misc_feature 1: /note="T is a lgT3 nucleotide analog"
  misc_feature 1: /note="The nucleotide in position 1 and the nucleotide in position 2 are linked through a phosphorothioate linkage"
  misc_feature 2: /note="T is a lgT3 nucleotide analog"
  misc_feature 2: /note="The nucleotide in position 2 and the nucleotide in position 1 are linked through a phosphorothioate linkage"
  misc_feature 2: /note="The nucleotide in position 2 and the nucleotide in position 3 are linked through a phosphorothioate linkage"
  misc_feature 3: /note="T is a lgT3 nucleotide analog"
  misc_feature 3: /note="The nucleotide in position 3 and the nucleotide in position 2 are linked through a phosphorothioate linkage"
  misc_feature 3: /note="The nucleotide in position 3 and the nucleotide in position 4 are linked through a phosphodiester linkage"
  misc_feature 4: /note="The nucleotide in position 4 and the nucleotide in position 3 are linked through a phosphodiester linkage"
  misc_feature 4: /note="The nucleotide in position 4 and the nucleotide in position 5 are linked through a phosphodiester linkage"
  misc_feature 4: /note="G is a 2'-O-Methylguanosine (mG)"
  misc_feature 5: /note="C is a 2'-O-Methylcytidine (mC)"
  misc_feature 5: /note="The nucleotide in position 5 and the nucleotide in position 4 are linked through a phosphodiester linkage"
  misc_feature 5: /note="The nucleotide in position 5 and the nucleotide in position 6 are linked through a phosphodiester linkage"
  misc_feature 6: /note="The nucleotide in position 6 and the nucleotide in position 5 are linked through a phosphodiester linkage"
  misc_feature 6: /note="The nucleotide in position 6 and the nucleotide in position 7 are linked through a phosphodiester linkage"
  misc_feature 6: /note="A is a 2'-O-Methyladenosine (mA)"
  misc_feature 7: /note="The nucleotide in position 7 and the nucleotide in position 6 are linked through a phosphodiester linkage"
  misc_feature 7: /note="The nucleotide in position 7 and the nucleotide in position 8 are linked through a phosphodiester linkage"
  misc_feature 7: /note="U is a 2'-O-Methyluridine (mU)"
  misc_feature 8: /note="The nucleotide in position 8 and the nucleotide in position 7 are linked through a phosphodiester linkage"
  misc_feature 8: /note="The nucleotide in position 8 and the nucleotide in position 9 are linked through a phosphodiester linkage"
  misc_feature 8: /note="U is a 2'-fluoro-uridine (fU)"
  misc_feature 9: /note="The nucleotide in position 9 and the nucleotide in position 8 are linked through a phosphodiester linkage"
  misc_feature 9: /note="The nucleotide in position 9 and the nucleotide in position 10 are linked through a phosphodiester linkage"
  misc_feature 9: /note="U is a 2'-O-Methyluridine (mU)"
  misc_feature 10: /note="The nucleotide in position 10 and the nucleotide in position 9 are linked through a phosphodiester linkage"
  misc_feature 10: /note="The nucleotide in position 10 and the nucleotide in position 11 are linked through a phosphodiester linkage"
  misc_feature 10: /note="U is a 2'-fluoro-uridine (fU)"
  misc_feature 11: /note="The nucleotide in position 11 and the nucleotide in position 12 are linked through a phosphodiester linkage"
  misc_feature 11: /note="The nucleotide in position 11 and the nucleotide in position 10 are linked through a phosphodiester linkage"
  misc_feature 11: /note="U is a 2'-fluoro-uridine (fU)"
  misc_feature 12: /note="The nucleotide in position 12 and the nucleotide in position 13 are linked through a phosphodiester linkage"
  misc_feature 12: /note="The nucleotide in position 12 and the nucleotide in position 11 are linked through a phosphodiester linkage"
  misc_feature 12: /note="A is a 2'-fluoro-adenosine (fA)"
  misc_feature 13: /note="The nucleotide in position 13 and the nucleotide in position 14 are linked through a phosphodiester linkage"
  misc_feature 13: /note="The nucleotide in position 13 and the nucleotide in position 12 are linked through a phosphodiester linkage"
  misc_feature 13: /note="U is a 2'-O-Methyluridine (mU)"
  misc_feature 14: /note="The nucleotide in position 14 and the nucleotide in position 15 are linked through a phosphodiester linkage"
  misc_feature 14: /note="The nucleotide in position 14 and the nucleotide in position 13 are linked through a phosphodiester linkage"
  misc_feature 14: /note="U is a 2'-O-Methyluridine (mU)"
  misc_feature 15: /note="The nucleotide in position 15 and the nucleotide in position 16 are linked through a phosphodiester linkage"
  misc_feature 15: /note="The nucleotide in position 15 and the nucleotide in position 14 are linked through a phosphodiester linkage"
  misc_feature 15: /note="A is a 2'-O-Methyladenosine (mA)"
  misc_feature 16: /note="The nucleotide in position 16 and the nucleotide in position 17 are linked through a phosphodiester linkage"
  misc_feature 16: /note="The nucleotide in position 16 and the nucleotide in position 15 are linked through a phosphodiester linkage"
  misc_feature 16: /note="A is a 2'-O-Methyladenosine (mA)"
  misc_feature 17: /note="The nucleotide in position 17 and the nucleotide in position 18 are linked through a phosphodiester linkage"
  misc_feature 17: /note="The nucleotide in position 17 and the nucleotide in position 16 are linked through a phosphodiester linkage"
  misc_feature 17: /note="U is a 2'-O-Methyluridine (mU)"
  misc_feature 18: /note="The nucleotide in position 18 and the nucleotide in position 19 are linked through a phosphodiester linkage"
  misc_feature 18: /note="The nucleotide in position 18 and the nucleotide in position 17 are linked through a phosphodiester linkage"
  misc_feature 18: /note="A is a 2'-O-Methyladenosine (mA)"
  misc_feature 19: /note="The nucleotide in position 19 and the nucleotide in position 20 are linked through a phosphodiester linkage"
  misc_feature 19: /note="The nucleotide in position 19 and the nucleotide in position 18 are linked through a phosphodiester linkage"
  misc_feature 19: /note="U is a 2'-O-Methyluridine (mU)"
  misc_feature 20: /note="The nucleotide in position 20 and the nucleotide in position 19 are linked through a phosphodiester linkage"
  misc_feature 20: /note="The nucleotide in position 20 and the nucleotide in position 21 are linked through a phosphorothioate linkage"
  misc_feature 20: /note="G is a 2'-O-Methylguanosine (mG)"
  misc_feature 21: /note="The nucleotide in position 21 and the nucleotide in position 20 are linked through a phosphorothioate linkage"
  misc_feature 21: /note="T is a LT4 nucleotide analog"
  misc_feature 21: /note="The nucleotide in position 21 and the nucleotide in position 22 are linked through a phosphorothioate linkage"
  misc_feature 22: /note="T is a LT4 nucleotide analog"
  misc_feature 22: /note="The nucleotide in position 22 and the nucleotide in position 21 are linked through a phosphorothioate linkage"
tttgcauuuuuauuaauaugtt

SEQ ID NO: 604 - RNA, 22 nt, Artificial Sequence
  forward C027.002#29; #30; #31; #32; #33
  misc_feature 1: /note="T is a lgT3 nucleotide analog"
  misc_feature 1: /note="The nucleotide in position 1 and the nucleotide in position 2 are linked through a phosphodiester linkage"
  misc_feature 2: /note="T is a lgT3 nucleotide analog"
  misc_feature 2: /note="The nucleotide in position 2 and the nucleotide in position 1 are linked through a phosphodiester linkage"
  misc_feature 2: /note="The nucleotide in position 2 and the nucleotide in position 3 are linked through a phosphodiester linkage"
  misc_feature 3: /note="T is a lgT3 nucleotide analog"
  misc_feature 3: /note="The nucleotide in position 3 and the nucleotide in position 2 are linked through a phosphodiester linkage"
  misc_feature 3: /note="The nucleotide in position 3 and the nucleotide in position 4 are linked through a phosphodiester linkage"
  misc_feature 4: /note="The nucleotide in position 4 and the nucleotide in position 3 are linked through a phosphodiester linkage"
  misc_feature 4: /note="The nucleotide in position 4 and the nucleotide in position 5 are linked through a phosphodiester linkage"
  misc_feature 4: /note="G is a locked guanine (lG)"
  misc_feature 5: /note="C is a locked cytosine (lC)"
  misc_feature 5: /note="The nucleotide in position 5 and the nucleotide in position 4 are linked through a phosphodiester linkage"
  misc_feature 5: /note="The nucleotide in position 5 and the nucleotide in position 6 are linked through a phosphodiester linkage"
  misc_feature 6: /note="The nucleotide in position 6 and the nucleotide in position 5 are linked through a phosphodiester linkage"
  misc_feature 6: /note="The nucleotide in position 6 and the nucleotide in position 7 are linked through a phosphodiester linkage"
  misc_feature 6: /note="A is a 2'-O-Methyladenosine (mA)"
  misc_feature 7: /note="The nucleotide in position 7 and the nucleotide in position 6 are linked through a phosphodiester linkage"
  misc_feature 7: /note="The nucleotide in position 7 and the nucleotide in position 8 are linked through a phosphodiester linkage"
  misc_feature 7: /note="U is a 2'-O-Methyluridine (mU)"
  misc_feature 8: /note="The nucleotide in position 8 and the nucleotide in position 7 are linked through a phosphodiester linkage"
  misc_feature 8: /note="The nucleotide in position 8 and the nucleotide in position 9 are linked through a phosphodiester linkage"
  misc_feature 8: /note="U is a 2'-fluoro-uridine (fU)"
  misc_feature 9: /note="The nucleotide in position 9 and the nucleotide in position 8 are linked through a phosphodiester linkage"
  misc_feature 9: /note="The nucleotide in position 9 and the nucleotide in position 10 are linked through a phosphodiester linkage"
  misc_feature 9: /note="U is a 2'-O-Methyluridine (mU)"
  misc_feature 10: /note="The nucleotide in position 10 and the nucleotide in position 9 are linked through a phosphodiester linkage"
  misc_feature 10: /note="The nucleotide in position 10 and the nucleotide in position 11 are linked through a phosphodiester linkage"
  misc_feature 10: /note="U is a 2'-fluoro-uridine (fU)"
  misc_feature 11: /note="The nucleotide in position 11 and the nucleotide in position 12 are linked through a phosphodiester linkage"
  misc_feature 11: /note="The nucleotide in position 11 and the nucleotide in position 10 are linked through a phosphodiester linkage"
  misc_feature 11: /note="U is a 2'-fluoro-uridine (fU)"
  misc_feature 12: /note="The nucleotide in position 12 and the nucleotide in position 13 are linked through a phosphodiester linkage"
  misc_feature 12: /note="The nucleotide in position 12 and the nucleotide in position 11 are linked through a phosphodiester linkage"
  misc_feature 12: /note="A is a 2'-fluoro-adenosine (fA)"
  misc_feature 13: /note="The nucleotide in position 13 and the nucleotide in position 14 are linked through a phosphodiester linkage"
  misc_feature 13: /note="The nucleotide in position 13 and the nucleotide in position 12 are linked through a phosphodiester linkage"
  misc_feature 13: /note="U is a 2'-O-Methyluridine (mU)"
  misc_feature 14: /note="The nucleotide in position 14 and the nucleotide in position 15 are linked through a phosphodiester linkage"
  misc_feature 14: /note="The nucleotide in position 14 and the nucleotide in position 13 are linked through a phosphodiester linkage"
  misc_feature 14: /note="U is a 2'-O-Methyluridine (mU)"
  misc_feature 15: /note="The nucleotide in position 15 and the nucleotide in position 16 are linked through a phosphodiester linkage"
  misc_feature 15: /note="The nucleotide in position 15 and the nucleotide in position 14 are linked through a phosphodiester linkage"
  misc_feature 15: /note="A is a 2'-O-Methyladenosine (mA)"
  misc_feature 16: /note="The nucleotide in position 16 and the nucleotide in position 17 are linked through a phosphodiester linkage"
  misc_feature 16: /note="The nucleotide in position 16 and the nucleotide in position 15 are linked through a phosphodiester linkage"
  misc_feature 16: /note="A is a 2'-O-Methyladenosine (mA)"
  misc_feature 17: /note="The nucleotide in position 17 and the nucleotide in position 18 are linked through a phosphodiester linkage"
  misc_feature 17: /note="The nucleotide in position 17 and the nucleotide in position 16 are linked through a phosphodiester linkage"
  misc_feature 17: /note="U is a 2'-O-Methyluridine (mU)"
  misc_feature 18: /note="The nucleotide in position 18 and the nucleotide in position 19 are linked through a phosphodiester linkage"
  misc_feature 18: /note="The nucleotide in position 18 and the nucleotide in position 17 are linked through a phosphodiester linkage"
  misc_feature 18: /note="A is a 2'-O-Methyladenosine (mA)"
  misc_feature 19: /note="The nucleotide in position 19 and the nucleotide in position 20 are linked through a phosphodiester linkage"
  misc_feature 19: /note="The nucleotide in position 19 and the nucleotide in position 18 are linked through a phosphodiester linkage"
  misc_feature 19: /note="U is a 2'-O-Methyluridine (mU)"
  misc_feature 20: /note="The nucleotide in position 20 and the nucleotide in position 19 are linked through a phosphodiester linkage"
  misc_feature 20: /note="The nucleotide in position 20 and the nucleotide in position 21 are linked through a phosphodiester linkage"
  misc_feature 20: /note="G is a 2'-O-Methylguanosine (mG)"
  misc_feature 21: /note="The nucleotide in position 21 and the nucleotide in position 20 are linked through a phosphodiester linkage"
  misc_feature 21: /note="T is a LT4 nucleotide analog"
  misc_feature 21: /note="The nucleotide in position 21 and the nucleotide in position 22 are linked through a phosphodiester linkage"
  misc_feature 22: /note="T is a LT4 nucleotide analog"
  misc_feature 22: /note="The nucleotide in position 22 and the nucleotide in position 21 are linked through a phosphodiester linkage"
tttgcauuuuuauuaauaugtt

SEQ ID NO: 605 - RNA, 22 nt, Artificial Sequence
  forward C027.002#34; #35; #36; #37; #38
  misc_feature 1: /note="T is a lgT3 nucleotide analog"
  misc_feature 1: /note="The nucleotide in position 1 and the nucleotide in position 2 are linked through a phosphorothioate linkage"
  misc_feature 2: /note="T is a lgT3 nucleotide analog"
  misc_feature 2: /note="The nucleotide in position 2 and the nucleotide in position 1 are linked through a phosphorothioate linkage"
  misc_feature 2: /note="The nucleotide in position 2 and the nucleotide in position 3 are linked through a phosphorothioate linkage"
  misc_feature 3: /note="T is a lgT3 nucleotide analog"
  misc_feature 3: /note="The nucleotide in position 3 and the nucleotide in position 2 are linked through a phosphorothioate linkage"
  misc_feature 3: /note="The nucleotide in position 3 and the nucleotide in position 4 are linked through a phosphodiester linkage"
  misc_feature 4: /note="The nucleotide in position 4 and the nucleotide in position 3 are linked through a phosphodiester linkage"
  misc_feature 4: /note="The nucleotide in position 4 and the nucleotide in position 5 are linked through a phosphodiester linkage"
  misc_feature 4: /note="G is a locked guanine (lG)"
  misc_feature 5: /note="C is a locked cytosine (lC)"
  misc_feature 5: /note="The nucleotide in position 5 and the nucleotide in position 4 are linked through a phosphodiester linkage"
  misc_feature 5: /note="The nucleotide in position 5 and the nucleotide in position 6 are linked through a phosphodiester linkage"
  misc_feature 6: /note="The nucleotide in position 6 and the nucleotide in position 5 are linked through a phosphodiester linkage"
  misc_feature 6: /note="The nucleotide in position 6 and the nucleotide in position 7 are linked through a phosphodiester linkage"
  misc_feature 6: /note="A is a 2'-O-Methyladenosine (mA)"
  misc_feature 7: /note="The nucleotide in position 7 and the nucleotide in position 6 are linked through a phosphodiester linkage"
  misc_feature 7: /note="The nucleotide in position 7 and the nucleotide in position 8 are linked through a phosphodiester linkage"
  misc_feature 7: /note="U is a 2'-O-Methyluridine (mU)"
  misc_feature 8: /note="The nucleotide in position 8 and the nucleotide in position 7 are linked through a phosphodiester linkage"
  misc_feature 8: /note="The nucleotide in position 8 and the nucleotide in position 9 are linked through a phosphodiester linkage"
  misc_feature 8: /note="U is a 2'-fluoro-uridine (fU)"
  misc_feature 9: /note="The nucleotide in position 9 and the nucleotide in position 8 are linked through a phosphodiester linkage"
  misc_feature 9: /note="The nucleotide in position 9 and the nucleotide in position 10 are linked through a phosphodiester linkage"
  misc_feature 9: /note="U is a 2'-O-Methyluridine (mU)"
  misc_feature 10: /note="The nucleotide in position 10 and the nucleotide in position 9 are linked through a phosphodiester linkage"
  misc_feature 10: /note="The nucleotide in position 10 and the nucleotide in position 11 are linked through a phosphodiester linkage"
  misc_feature 10: /note="U is a 2'-fluoro-uridine (fU)"
  misc_feature 11: /note="The nucleotide in position 11 and the nucleotide in position 12 are linked through a phosphodiester linkage"
  misc_feature 11: /note="The nucleotide in position 11 and the nucleotide in position 10 are linked through a phosphodiester linkage"
  misc_feature 11: /note="U is a 2'-fluoro-uridine (fU)"
  misc_feature 12: /note="The nucleotide in position 12 and the nucleotide in position 13 are linked through a phosphodiester linkage"
  misc_feature 12: /note="The nucleotide in position 12 and the nucleotide in position 11 are linked through a phosphodiester linkage"
  misc_feature 12: /note="A is a 2'-fluoro-adenosine (fA)"
  misc_feature 13: /note="The nucleotide in position 13 and the nucleotide in position 14 are linked through a phosphodiester linkage"
  misc_feature 13: /note="The nucleotide in position 13 and the nucleotide in position 12 are linked through a phosphodiester linkage"
  misc_feature 13: /note="U is a 2'-O-Methyluridine (mU)"
  misc_feature 14: /note="The nucleotide in position 14 and the nucleotide in position 15 are linked through a phosphodiester linkage"
  misc_feature 14: /note="The nucleotide in position 14 and the nucleotide in position 13 are linked through a phosphodiester linkage"
  misc_feature 14: /note="U is a 2'-O-Methyluridine (mU)"
  misc_feature 15: /note="The nucleotide in position 15 and the nucleotide in position 16 are linked through a phosphodiester linkage"
  misc_feature 15: /note="The nucleotide in position 15 and the nucleotide in position 14 are linked through a phosphodiester linkage"
  misc_feature 15: /note="A is a 2'-O-Methyladenosine (mA)"
  misc_feature 16: /note="The nucleotide in position 16 and the nucleotide in position 17 are linked through a phosphodiester linkage"
  misc_feature 16: /note="The nucleotide in position 16 and the nucleotide in position 15 are linked through a phosphodiester linkage"
  misc_feature 16: /note="A is a 2'-O-Methyladenosine (mA)"
  misc_feature 17: /note="The nucleotide in position 17 and the nucleotide in position 18 are linked through a phosphodiester linkage"
  misc_feature 17: /note="The nucleotide in position 17 and the nucleotide in position 16 are linked through a phosphodiester linkage"
  misc_feature 17: /note="U is a 2'-O-Methyluridine (mU)"
  misc_feature 18: /note="The nucleotide in position 18 and the nucleotide in position 19 are linked through a phosphodiester linkage"
  misc_feature 18: /note="The nucleotide in position 18 and the nucleotide in position 17 are linked through a phosphodiester linkage"
  misc_feature 18: /note="A is a 2'-O-Methyladenosine (mA)"
  misc_feature 19: /note="The nucleotide in position 19 and the nucleotide in position 20 are linked through a phosphodiester linkage"
  misc_feature 19: /note="The nucleotide in position 19 and the nucleotide in position 18 are linked through a phosphodiester linkage"
  misc_feature 19: /note="U is a 2'-O-Methyluridine (mU)"
  misc_feature 20: /note="The nucleotide in position 20 and the nucleotide in position 19 are linked through a phosphodiester linkage"
  misc_feature 20: /note="The nucleotide in position 20 and the nucleotide in position 21 are linked through a phosphodiester linkage"
  misc_feature 20: /note="G is a 2'-O-Methylguanosine (mG)"
  misc_feature 21: /note="The nucleotide in position 21 and the nucleotide in position 20 are linked through a phosphodiester linkage"
  misc_feature 21: /note="G is a 2'-O-Methylguanosine (mG)"
  misc_feature 21: /note="The nucleotide in position 21 and the nucleotide in position 22 are linked through a phosphodiester linkage"
  misc_feature 22: /note="U is a 2'-O-Methyluridine (mU)"
  misc_feature 22: /note="The nucleotide in position 22 and the nucleotide in position 21 are linked through a phosphorothioate linkage"
  misc_feature 22: /note="The nucleotide in position 22 and the nucleotide in position 23 are linked through a phosphodiester linkage"
tttgcauuuuuauuaauaugtt

SEQ ID NO: 606 - RNA, 24 nt, Artificial Sequence
  forward C027.002#39; #40; #41; #42; #43; #44; #45; #46; #47
  misc_feature 1: /note="T is a lgT3 nucleotide analog"
  misc_feature 1: /note="The nucleotide in position 1 and the nucleotide in position 2 are linked through a phosphodiester linkage"
  misc_feature 2: /note="T is a lgT3 nucleotide analog"
  misc_feature 2: /note="The nucleotide in position 2 and the nucleotide in position 1 are linked through a phosphodiester linkage"
  misc_feature 2: /note="The nucleotide in position 2 and the nucleotide in position 3 are linked through a phosphodiester linkage"
  misc_feature 3: /note="T is a lgT3 nucleotide analog"
  misc_feature 3: /note="The nucleotide in position 3 and the nucleotide in position 2 are linked through a phosphodiester linkage"
  misc_feature 3: /note="The nucleotide in position 3 and the nucleotide in position 4 are linked through a phosphodiester linkage"
  misc_feature 4: /note="The nucleotide in position 4 and the nucleotide in position 3 are linked through a phosphodiester linkage"
  misc_feature 4: /note="The nucleotide in position 4 and the nucleotide in position 5 are linked through a phosphodiester linkage"
  misc_feature 4: /note="G is a 2'-O-Methylguanosine (mG)"
  misc_feature 5: /note="C is a 2'-O-Methylcytidine (mC)"
  misc_feature 5: /note="The nucleotide in position 5 and the nucleotide in position 4 are linked through a phosphodiester linkage"
  misc_feature 5: /note="The nucleotide in position 5 and the nucleotide in position 6 are linked through a phosphodiester linkage"
  misc_feature 6: /note="The nucleotide in position 6 and the nucleotide in position 5 are linked through a phosphodiester linkage"
  misc_feature 6: /note="The nucleotide in position 6 and the nucleotide in position 7 are linked through a phosphodiester linkage"
  misc_feature 6: /note="A is a 2'-O-Methyladenosine (mA)"
  misc_feature 7: /note="The nucleotide in position 7 and the nucleotide in position 6 are linked through a phosphodiester linkage"
  misc_feature 7: /note="The nucleotide in position 7 and the nucleotide in position 8 are linked through a phosphodiester linkage"
  misc_feature 7: /note="U is a 2'-O-Methyluridine (mU)"
  misc_feature 8: /note="The nucleotide in position 8 and the nucleotide in position 7 are linked through a phosphodiester linkage"
  misc_feature 8: /note="The nucleotide in position 8 and the nucleotide in position 9 are linked through a phosphodiester linkage"
  misc_feature 8: /note="U is a 2'-fluoro-uridine (fU)"
  misc_feature 9: /note="The nucleotide in position 9 and the nucleotide in position 8 are linked through a phosphodiester linkage"
  misc_feature 9: /note="The nucleotide in position 9 and the nucleotide in position 10 are linked through a phosphodiester linkage"
  misc_feature 9: /note="U is a 2'-O-Methyluridine (mU)"
  misc_feature 10: /note="The nucleotide in position 10 and the nucleotide in position 9 are linked through a phosphodiester linkage"
  misc_feature 10: /note="The nucleotide in position 10 and the nucleotide in position 11 are linked through a phosphodiester linkage"
  misc_feature 10: /note="U is a 2'-fluoro-uridine (fU)"
  misc_feature 11: /note="The nucleotide in position 11 and the nucleotide in position 12 are linked through a phosphodiester linkage"
  misc_feature 11: /note="The nucleotide in position 11 and the nucleotide in position 10 are linked through a phosphodiester linkage"
  misc_feature 11: /note="U is a 2'-fluoro-uridine (fU)"
  misc_feature 12: /note="The nucleotide in position 12 and the nucleotide in position 13 are linked through a phosphodiester linkage"
  misc_feature 12: /note="The nucleotide in position 12 and the nucleotide in position 11 are linked through a phosphodiester linkage"
  misc_feature 12: /note="A is a 2'-fluoro-adenosine (fA)"
  misc_feature 13: /note="The nucleotide in position 13 and the nucleotide in position 14 are linked through a phosphodiester linkage"
  misc_feature 13: /note="The nucleotide in position 13 and the nucleotide in position 12 are linked through a phosphodiester linkage"
  misc_feature 13: /note="U is a 2'-O-Methyluridine (mU)"
  misc_feature 14: /note="The nucleotide in position 14 and the nucleotide in position 15 are linked through a phosphodiester linkage"
  misc_feature 14: /note="The nucleotide in position 14 and the nucleotide in position 13 are linked through a phosphodiester linkage"
  misc_feature 14: /note="U is a 2'-O-Methyluridine (mU)"
  misc_feature 15: /note="The nucleotide in position 15 and the nucleotide in position 16 are linked through a phosphodiester linkage"
  misc_feature 15: /note="The nucleotide in position 15 and the nucleotide in position 14 are linked through a phosphodiester linkage"
  misc_feature 15: /note="A is a 2'-O-Methyladenosine (mA)"
  misc_feature 16: /note="The nucleotide in position 16 and the nucleotide in position 17 are linked through a phosphodiester linkage"
  misc_feature 16: /note="The nucleotide in position 16 and the nucleotide in position 15 are linked through a phosphodiester linkage"
  misc_feature 16: /note="A is a 2'-O-Methyladenosine (mA)"
  misc_feature 17: /note="The nucleotide in position 17 and the nucleotide in position 18 are linked through a phosphodiester linkage"
  misc_feature 17: /note="The nucleotide in position 17 and the nucleotide in position 16 are linked through a phosphodiester linkage"
  misc_feature 17: /note="U is a 2'-O-Methyluridine (mU)"
  misc_feature 18: /note="The nucleotide in position 18 and the nucleotide in position 19 are linked through a phosphodiester linkage"
  misc_feature 18: /note="The nucleotide in position 18 and the nucleotide in position 17 are linked through a phosphodiester linkage"
  misc_feature 18: /note="A is a 2'-O-Methyladenosine (mA)"
  misc_feature 19: /note="The nucleotide in position 19 and the nucleotide in position 20 are linked through a phosphodiester linkage"
  misc_feature 19: /note="The nucleotide in position 19 and the nucleotide in position 18 are linked through a phosphodiester linkage"
  misc_feature 19: /note="U is a 2'-O-Methyluridine (mU)"
  misc_feature 20: /note="The nucleotide in position 20 and the nucleotide in position 19 are linked through a phosphodiester linkage"
  misc_feature 20: /note="The nucleotide in position 20 and the nucleotide in position 21 are linked through a phosphodiester linkage"
  misc_feature 20: /note="G is a 2'-O-Methylguanosine (mG)"
  misc_feature 21: /note="The nucleotide in position 21 and the nucleotide in position 20 are linked through a phosphodiester linkage"
  misc_feature 21: /note="T is a LT4 nucleotide analog"
  misc_feature 21: /note="The nucleotide in position 21 and the nucleotide in position 22 are linked through a phosphodiester linkage"
  misc_feature 22: /note="U is a 2'-O-Methyluridine (mU)"
  misc_feature 22: /note="The nucleotide in position 22 and the nucleotide in position 21 are linked through a phosphodiester linkage"
  misc_feature 22: /note="The nucleotide in position 22 and the nucleotide in position 23 are linked through a phosphodiester linkage"
  misc_feature 23: /note="T is a LT4 nucleotide analog"
  misc_feature 23: /note="The nucleotide in position 23 and the nucleotide in position 22 are linked through a phosphodiester linkage"
  misc_feature 23: /note="The nucleotide in position 23 and the nucleotide in position 24 are linked through a phosphodiester linkage"
  misc_feature 24: /note="T is a LT4 nucleotide analog"
  misc_feature 24: /note="The nucleotide in position 24 and the nucleotide in position 23 are linked through a phosphodiester linkage"
tttgcauuuuuauuaauauggutt

SEQ ID NO: 607 - RNA, 24 nt, Artificial Sequence
  forward C027.002#48; #49; #50; #51; #52; #53; #54; #55 #56
  misc_feature 1: /note="T is a lgT3 nucleotide analog"
  misc_feature 1: /note="The nucleotide in position 1 and the nucleotide in position 2 are linked through a phosphorothioate linkage"
  misc_feature 2: /note="T is a lgT3 nucleotide analog"
  misc_feature 2: /note="The nucleotide in position 2 and the nucleotide in position 1 are linked through a phosphorothioate linkage"
  misc_feature 2: /note="The nucleotide in position 2 and the nucleotide in position 3 are linked through a phosphorothioate linkage"
  misc_feature 3: /note="T is a lgT3 nucleotide analog"
  misc_feature 3: /note="The nucleotide in position 3 and the nucleotide in position 2 are linked through a phosphodiester linkage"
  misc_feature 3: /note="The nucleotide in position 3 and the nucleotide in position 4 are linked through a phosphodiester linkage"
  misc_feature 4: /note="The nucleotide in position 4 and the nucleotide in position 3 are linked through a phosphodiester linkage"
  misc_feature 4: /note="The nucleotide in position 4 and the nucleotide in position 5 are linked through a phosphodiester linkage"
  misc_feature 4: /note="G is a 2'-O-Methylguanosine (mG)"
  misc_feature 5: /note="C is a 2'-O-Methylcytidine (mC)"
  misc_feature 5: /note="The nucleotide in position 5 and the nucleotide in position 4 are linked through a phosphodiester linkage"
  misc_feature 5: /note="The nucleotide in position 5 and the nucleotide in position 6 are linked through a phosphodiester linkage"
  misc_feature 6: /note="The nucleotide in position 6 and the nucleotide in position 5 are linked through a phosphodiester linkage"
  misc_feature 6: /note="The nucleotide in position 6 and the nucleotide in position 7 are linked through a phosphodiester linkage"
  misc_feature 6: /note="A is a 2'-O-Methyladenosine (mA)"
  misc_feature 7: /note="The nucleotide in position 7 and the nucleotide in position 6 are linked through a phosphodiester linkage"
  misc_feature 7: /note="The nucleotide in position 7 and the nucleotide in position 8 are linked through a phosphodiester linkage"
  misc_feature 7: /note="U is a 2'-O-Methyluridine (mU)"
  misc_feature 8: /note="The nucleotide in position 8 and the nucleotide in position 7 are linked through a phosphodiester linkage"
  misc_feature 8: /note="The nucleotide in position 8 and the nucleotide in position 9 are linked through a phosphodiester linkage"
  misc_feature 8: /note="U is a 2'-fluoro-uridine (fU)"
  misc_feature 9: /note="The nucleotide in position 9 and the nucleotide in position 8 are linked through a phosphodiester linkage"
  misc_feature 9: /note="The nucleotide in position 9 and the nucleotide in position 10 are linked through a phosphodiester linkage"
  misc_feature 9: /note="U is a 2'-O-Methyluridine (mU)"
  misc_feature 10: /note="The nucleotide in position 10 and the nucleotide in position 9 are linked through a phosphodiester linkage"
  misc_feature 10: /note="The nucleotide in position 10 and the nucleotide in position 11 are linked through a phosphodiester linkage"
  misc_feature 10: /note="U is a 2'-fluoro-uridine (fU)"
  misc_feature 11: /note="The nucleotide in position 11 and the nucleotide in position 12 are linked through a phosphodiester linkage"
  misc_feature 11: /note="The nucleotide in position 11 and the nucleotide in position 10 are linked through a phosphodiester linkage"
  misc_feature 11: /note="U is a 2'-fluoro-uridine (fU)"
  misc_feature 12: /note="The nucleotide in position 12 and the nucleotide in position 13 are linked through a phosphodiester linkage"
  misc_feature 12: /note="The nucleotide in position 12 and the nucleotide in position 11 are linked through a phosphodiester linkage"
  misc_feature 12: /note="A is a 2'-fluoro-adenosine (fA)"
  misc_feature 13: /note="The nucleotide in position 13 and the nucleotide in position 14 are linked through a phosphodiester linkage"
  misc_feature 13: /note="The nucleotide in position 13 and the nucleotide in position 12 are linked through a phosphodiester linkage"
  misc_feature 13: /note="U is a 2'-O-Methyluridine (mU)"
  misc_feature 14: /note="The nucleotide in position 14 and the nucleotide in position 15 are linked through a phosphodiester linkage"
  misc_feature 14: /note="The nucleotide in position 14 and the nucleotide in position 13 are linked through a phosphodiester linkage"
  misc_feature 14: /note="U is a 2'-O-Methyluridine (mU)"
  misc_feature 15: /note="The nucleotide in position 15 and the nucleotide in position 16 are linked through a phosphodiester linkage"
  misc_feature 15: /note="The nucleotide in position 15 and the nucleotide in position 14 are linked through a phosphodiester linkage"
  misc_feature 15: /note="A is a 2'-O-Methyladenosine (mA)"
  misc_feature 16: /note="The nucleotide in position 16 and the nucleotide in position 17 are linked through a phosphodiester linkage"
  misc_feature 16: /note="The nucleotide in position 16 and the nucleotide in position 15 are linked through a phosphodiester linkage"
  misc_feature 16: /note="A is a 2'-O-Methyladenosine (mA)"
  misc_feature 17: /note="The nucleotide in position 17 and the nucleotide in position 18 are linked through a phosphodiester linkage"
  misc_feature 17: /note="The nucleotide in position 17 and the nucleotide in position 16 are linked through a phosphodiester linkage"
  misc_feature 17: /note="U is a 2'-O-Methyluridine (mU)"
  misc_feature 18: /note="The nucleotide in position 18 and the nucleotide in position 19 are linked through a phosphodiester linkage"
  misc_feature 18: /note="The nucleotide in position 18 and the nucleotide in position 17 are linked through a phosphodiester linkage"
  misc_feature 18: /note="A is a 2'-O-Methyladenosine (mA)"
  misc_feature 19: /note="The nucleotide in position 19 and the nucleotide in position 20 are linked through a phosphodiester linkage"
  misc_feature 19: /note="The nucleotide in position 19 and the nucleotide in position 18 are linked through a phosphodiester linkage"
  misc_feature 19: /note="U is a 2'-O-Methyluridine (mU)"
  misc_feature 20: /note="The nucleotide in position 20 and the nucleotide in position 19 are linked through a phosphodiester linkage"
  misc_feature 20: /note="The nucleotide in position 20 and the nucleotide in position 21 are linked through a phosphodiester linkage"
  misc_feature 20: /note="G is a 2'-O-Methylguanosine (mG)"
  misc_feature 21: /note="The nucleotide in position 21 and the nucleotide in position 20 are linked through a phosphodiester linkage"
  misc_feature 21: /note="T is a LT4 nucleotide analog"
  misc_feature 21: /note="The nucleotide in position 21 and the nucleotide in position 22 are linked through a phosphodiester linkage"
  misc_feature 22: /note="U is a 2'-O-Methyluridine (mU)"
  misc_feature 22: /note="The nucleotide in position 22 and the nucleotide in position 21 are linked through a phosphodiester linkage"
  misc_feature 22: /note="The nucleotide in position 22 and the nucleotide in position 23 are linked through a phosphorothioate linkage"
  misc_feature 23: /note="T is a LT4 nucleotide analog"
  misc_feature 23: /note="The nucleotide in position 23 and the nucleotide in position 22 are linked through a phosphorothioate linkage"
  misc_feature 23: /note="The nucleotide in position 23 and the nucleotide in position 24 are linked through a phosphorothioate linkage"
  misc_feature 24: /note="T is a LT4 nucleotide analog"
  misc_feature 24: /note="The nucleotide in position 24 and the nucleotide in position 23 are linked through a phosphorothioate linkage"
tttgcauuuuuauuaauauggutt

SEQ ID NO: 608 - RNA, 24 nt, Artificial Sequence
  forward C027.002#57; #58; #59; #60; #61
  misc_feature 1: /note="T is a lgT3 nucleotide analog"
  misc_feature 1: /note="The nucleotide in position 1 and the nucleotide in position 2 are linked through a phosphodiester linkage"
  misc_feature 2: /note="T is a lgT3 nucleotide analog"
  misc_feature 2: /note="The nucleotide in position 2 and the nucleotide in position 1 are linked through a phosphodiester linkage"
  misc_feature 2: /note="The nucleotide in position 2 and the nucleotide in position 3 are linked through a phosphodiester linkage"
  misc_feature 3: /note="T is a lgT3 nucleotide analog"
  misc_feature 3: /note="The nucleotide in position 3 and the nucleotide in position 2 are linked through a phosphodiester linkage"
  misc_feature 3: /note="The nucleotide in position 3 and the nucleotide in position 4 are linked through a phosphodiester linkage"
  misc_feature 4: /note="The nucleotide in position 4 and the nucleotide in position 3 are linked through a phosphodiester linkage"
  misc_feature 4: /note="The nucleotide in position 4 and the nucleotide in position 5 are linked through a phosphodiester linkage"
  misc_feature 4: /note="G is a locked guanine (lG)"
  misc_feature 5: /note="C is a locked cytosine (lC)"
  misc_feature 5: /note="The nucleotide in position 5 and the nucleotide in position 4 are linked through a phosphodiester linkage"
  misc_feature 5: /note="The nucleotide in position 5 and the nucleotide in position 6 are linked through a phosphodiester linkage"
  misc_feature 6: /note="The nucleotide in position 6 and the nucleotide in position 5 are linked through a phosphodiester linkage"
  misc_feature 6: /note="The nucleotide in position 6 and the nucleotide in position 7 are linked through a phosphodiester linkage"
  misc_feature 6: /note="A is a 2'-O-Methyladenosine (mA)"
  misc_feature 7: /note="The nucleotide in position 7 and the nucleotide in position 6 are linked through a phosphodiester linkage"
  misc_feature 7: /note="The nucleotide in position 7 and the nucleotide in position 8 are linked through a phosphodiester linkage"
  misc_feature 7: /note="U is a 2'-O-Methyluridine (mU)"
  misc_feature 8: /note="The nucleotide in position 8 and the nucleotide in position 7 are linked through a phosphodiester linkage"
  misc_feature 8: /note="The nucleotide in position 8 and the nucleotide in position 9 are linked through a phosphodiester linkage"
  misc_feature 8: /note="U is a 2'-fluoro-uridine (fU)"
  misc_feature 9: /note="The nucleotide in position 9 and the nucleotide in position 8 are linked through a phosphodiester linkage"
  misc_feature 9: /note="The nucleotide in position 9 and the nucleotide in position 10 are linked through a phosphodiester linkage"
  misc_feature 9: /note="U is a 2'-O-Methyluridine (mU)"
  misc_feature 10: /note="The nucleotide in position 10 and the nucleotide in position 9 are linked through a phosphodiester linkage"
  misc_feature 10: /note="The nucleotide in position 10 and the nucleotide in position 11 are linked through a phosphodiester linkage"
  misc_feature 10: /note="U is a 2'-fluoro-uridine (fU)"
  misc_feature 11: /note="The nucleotide in position 11 and the nucleotide in position 12 are linked through a phosphodiester linkage"
  misc_feature 11: /note="The nucleotide in position 11 and the nucleotide in position 10 are linked through a phosphodiester linkage"
  misc_feature 11: /note="U is a 2'-fluoro-uridine (fU)"
  misc_feature 12: /note="The nucleotide in position 12 and the nucleotide in position 13 are linked through a phosphodiester linkage"
  misc_feature 12: /note="The nucleotide in position 12 and the nucleotide in position 11 are linked through a phosphodiester linkage"
  misc_feature 12: /note="A is a 2'-fluoro-adenosine (fA)"
  misc_feature 13: /note="The nucleotide in position 13 and the nucleotide in position 14 are linked through a phosphodiester linkage"
  misc_feature 13: /note="The nucleotide in position 13 and the nucleotide in position 12 are linked through a phosphodiester linkage"
  misc_feature 13: /note="U is a 2'-O-Methyluridine (mU)"
  misc_feature 14: /note="The nucleotide in position 14 and the nucleotide in position 15 are linked through a phosphodiester linkage"
  misc_feature 14: /note="The nucleotide in position 14 and the nucleotide in position 13 are linked through a phosphodiester linkage"
  misc_feature 14: /note="U is a 2'-O-Methyluridine (mU)"
  misc_feature 15: /note="The nucleotide in position 15 and the nucleotide in position 16 are linked through a phosphodiester linkage"
  misc_feature 15: /note="The nucleotide in position 15 and the nucleotide in position 14 are linked through a phosphodiester linkage"
  misc_feature 15: /note="A is a 2'-O-Methyladenosine (mA)"
  misc_feature 16: /note="The nucleotide in position 16 and the nucleotide in position 17 are linked through a phosphodiester linkage"
  misc_feature 16: /note="The nucleotide in position 16 and the nucleotide in position 15 are linked through a phosphodiester linkage"
  misc_feature 16: /note="A is a 2'-O-Methyladenosine (mA)"
  misc_feature 17: /note="The nucleotide in position 17 and the nucleotide in position 18 are linked through a phosphodiester linkage"
  misc_feature 17: /note="The nucleotide in position 17 and the nucleotide in position 16 are linked through a phosphodiester linkage"
  misc_feature 17: /note="U is a 2'-O-Methyluridine (mU)"
  misc_feature 18: /note="The nucleotide in position 18 and the nucleotide in position 19 are linked through a phosphodiester linkage"
  misc_feature 18: /note="The nucleotide in position 18 and the nucleotide in position 17 are linked through a phosphodiester linkage"
  misc_feature 18: /note="A is a 2'-O-Methyladenosine (mA)"
  misc_feature 19: /note="The nucleotide in position 19 and the nucleotide in position 20 are linked through a phosphodiester linkage"
  misc_feature 19: /note="The nucleotide in position 19 and the nucleotide in position 18 are linked through a phosphodiester linkage"
  misc_feature 19: /note="U is a 2'-O-Methyluridine (mU)"
  misc_feature 20: /note="The nucleotide in position 20 and the nucleotide in position 19 are linked through a phosphodiester linkage"
  misc_feature 20: /note="The nucleotide in position 20 and the nucleotide in position 21 are linked through a phosphodiester linkage"
  misc_feature 20: /note="G is a 2'-O-Methylguanosine (mG)"
  misc_feature 21: /note="The nucleotide in position 21 and the nucleotide in position 20 are linked through a phosphodiester linkage"
  misc_feature 21: /note="T is a LT4 nucleotide analog"
  misc_feature 21: /note="The nucleotide in position 21 and the nucleotide in position 22 are linked through a phosphodiester linkage"
  misc_feature 22: /note="U is a 2'-O-Methyluridine (mU)"
  misc_feature 22: /note="The nucleotide in position 22 and the nucleotide in position 21 are linked through a phosphodiester linkage"
  misc_feature 22: /note="The nucleotide in position 22 and the nucleotide in position 23 are linked through a phosphodiester linkage"
  misc_feature 23: /note="T is a LT4 nucleotide analog"
  misc_feature 23: /note="The nucleotide in position 23 and the nucleotide in position 22 are linked through a phosphodiester linkage"
  misc_feature 23: /note="The nucleotide in position 23 and the nucleotide in position 24 are linked through a phosphodiester linkage"
  misc_feature 24: /note="T is a LT4 nucleotide analog"
  misc_feature 24: /note="The nucleotide in position 24 and the nucleotide in position 23 are linked through a phosphodiester linkage"
tttgcauuuuuauuaauauggutt

SEQ ID NO: 609 - RNA, 24 nt, Artificial Sequence
  forward C027.002#62; #63; #64; #65; #66
  misc_feature 1: /note="T is a lgT3 nucleotide analog"
  misc_feature 1: /note="The nucleotide in position 1 and the nucleotide in position 2 are linked through a phosphorothioate linkage"
  misc_feature 2: /note="T is a lgT3 nucleotide analog"
  misc_feature 2: /note="The nucleotide in position 2 and the nucleotide in position 1 are linked through a phosphorothioate linkage"
  misc_feature 2: /note="The nucleotide in position 2 and the nucleotide in position 3 are linked through a phosphorothioate linkage"
  misc_feature 3: /note="T is a lgT3 nucleotide analog"
  misc_feature 3: /note="The nucleotide in position 3 and the nucleotide in position 2 are linked through a phosphodiester linkage"
  misc_feature 3: /note="The nucleotide in position 3 and the nucleotide in position 4 are linked through a phosphodiester linkage"
  misc_feature 4: /note="The nucleotide in position 4 and the nucleotide in position 3 are linked through a phosphodiester linkage"
  misc_feature 4: /note="The nucleotide in position 4 and the nucleotide in position 5 are linked through a phosphodiester linkage"
  misc_feature 4: /note="G is a locked guanine (lG)"
  misc_feature 5: /note="C is a locked cytosine (lC)"
  misc_feature 5: /note="The nucleotide in position 5 and the nucleotide in position 4 are linked through a phosphodiester linkage"
  misc_feature 5: /note="The nucleotide in position 5 and the nucleotide in position 6 are linked through a phosphodiester linkage"
  misc_feature 6: /note="The nucleotide in position 6 and the nucleotide in position 5 are linked through a phosphodiester linkage"
  misc_feature 6: /note="The nucleotide in position 6 and the nucleotide in position 7 are linked through a phosphodiester linkage"
  misc_feature 6: /note="A is a 2'-O-Methyladenosine (mA)"
  misc_feature 7: /note="The nucleotide in position 7 and the nucleotide in position 6 are linked through a phosphodiester linkage"
  misc_feature 7: /note="The nucleotide in position 7 and the nucleotide in position 8 are linked through a phosphodiester linkage"
  misc_feature 7: /note="U is a 2'-O-Methyluridine (mU)"
  misc_feature 8: /note="The nucleotide in position 8 and the nucleotide in position 7 are linked through a phosphodiester linkage"
  misc_feature 8: /note="The nucleotide in position 8 and the nucleotide in position 9 are linked through a phosphodiester linkage"
  misc_feature 8: /note="U is a 2'-fluoro-uridine (fU)"
  misc_feature 9: /note="The nucleotide in position 9 and the nucleotide in position 8 are linked through a phosphodiester linkage"
  misc_feature 9: /note="The nucleotide in position 9 and the nucleotide in position 10 are linked through a phosphodiester linkage"
  misc_feature 9: /note="U is a 2'-O-Methyluridine (mU)"
  misc_feature 10: /note="The nucleotide in position 10 and the nucleotide in position 9 are linked through a phosphodiester linkage"
  misc_feature 10: /note="The nucleotide in position 10 and the nucleotide in position 11 are linked through a phosphodiester linkage"
  misc_feature 10: /note="U is a 2'-fluoro-uridine (fU)"
  misc_feature 11: /note="The nucleotide in position 11 and the nucleotide in position 12 are linked through a phosphodiester linkage"
  misc_feature 11: /note="The nucleotide in position 11 and the nucleotide in position 10 are linked through a phosphodiester linkage"
  misc_feature 11: /note="U is a 2'-fluoro-uridine (fU)"
  misc_feature 12: /note="The nucleotide in position 12 and the nucleotide in position 13 are linked through a phosphodiester linkage"
  misc_feature 12: /note="The nucleotide in position 12 and the nucleotide in position 11 are linked through a phosphodiester linkage"
  misc_feature 12: /note="A is a 2'-fluoro-adenosine (fA)"
  misc_feature 13: /note="The nucleotide in position 13 and the nucleotide in position 14 are linked through a phosphodiester linkage"
  misc_feature 13: /note="The nucleotide in position 13 and the nucleotide in position 12 are linked through a phosphodiester linkage"
  misc_feature 13: /note="U is a 2'-O-Methyluridine (mU)"
  misc_feature 14: /note="The nucleotide in position 14 and the nucleotide in position 15 are linked through a phosphodiester linkage"
  misc_feature 14: /note="The nucleotide in position 14 and the nucleotide in position 13 are linked through a phosphodiester linkage"
  misc_feature 14: /note="U is a 2'-O-Methyluridine (mU)"
  misc_feature 15: /note="The nucleotide in position 15 and the nucleotide in position 16 are linked through a phosphodiester linkage"
  misc_feature 15: /note="The nucleotide in position 15 and the nucleotide in position 14 are linked through a phosphodiester linkage"
  misc_feature 15: /note="A is a 2'-O-Methyladenosine (mA)"
  misc_feature 16: /note="The nucleotide in position 16 and the nucleotide in position 17 are linked through a phosphodiester linkage"
  misc_feature 16: /note="The nucleotide in position 16 and the nucleotide in position 15 are linked through a phosphodiester linkage"
  misc_feature 16: /note="A is a 2'-O-Methyladenosine (mA)"
  misc_feature 17: /note="The nucleotide in position 17 and the nucleotide in position 18 are linked through a phosphodiester linkage"
  misc_feature 17: /note="The nucleotide in position 17 and the nucleotide in position 16 are linked through a phosphodiester linkage"
  misc_feature 17: /note="U is a 2'-O-Methyluridine (mU)"
  misc_feature 18: /note="The nucleotide in position 18 and the nucleotide in position 19 are linked through a phosphodiester linkage"
  misc_feature 18: /note="The nucleotide in position 18 and the nucleotide in position 17 are linked through a phosphodiester linkage"
  misc_feature 18: /note="A is a 2'-O-Methyladenosine (mA)"
  misc_feature 19: /note="The nucleotide in position 19 and the nucleotide in position 20 are linked through a phosphodiester linkage"
  misc_feature 19: /note="The nucleotide in position 19 and the nucleotide in position 18 are linked through a phosphodiester linkage"
  misc_feature 19: /note="U is a 2'-O-Methyluridine (mU)"
  misc_feature 20: /note="The nucleotide in position 20 and the nucleotide in position 19 are linked through a phosphodiester linkage"
  misc_feature 20: /note="The nucleotide in position 20 and the nucleotide in position 21 are linked through a phosphodiester linkage"
  misc_feature 20: /note="G is a 2'-O-Methylguanosine (mG)"
  misc_feature 21: /note="The nucleotide in position 21 and the nucleotide in position 20 are linked through a phosphodiester linkage"
  misc_feature 21: /note="T is a LT4 nucleotide analog"
  misc_feature 21: /note="The nucleotide in position 21 and the nucleotide in position 22 are linked through a phosphodiester linkage"
  misc_feature 22: /note="U is a 2'-O-Methyluridine (mU)"
  misc_feature 22: /note="The nucleotide in position 22 and the nucleotide in position 21 are linked through a phosphodiester linkage"
  misc_feature 22: /note="The nucleotide in position 22 and the nucleotide in position 23 are linked through a phosphorothioate linkage"
  misc_feature 23: /note="T is a LT4 nucleotide analog"
  misc_feature 23: /note="The nucleotide in position 23 and the nucleotide in position 22 are linked through a phosphorothioate linkage"
  misc_feature 23: /note="The nucleotide in position 23 and the nucleotide in position 24 are linked through a phosphorothioate linkage"
  misc_feature 24: /note="T is a LT4 nucleotide analog"
  misc_feature 24: /note="The nucleotide in position 24 and the nucleotide in position 23 are linked through a phosphorothioate linkage"
tttgcauuuuuauuaauauggutt

SEQ ID NO: 610 - RNA, 21 nt, Artificial Sequence
  Reverse C027.002
  misc_feature 1: /note="A is a 2'-fluoro-adenosine (fA)"
  misc_feature 1: /note="The nucleotide in position 1 and the nucleotide in position 2 are linked through a phosphorothioate linkage"
  misc_feature 2: /note="C is a 2'-fluoro-cytidine (fC)"
  misc_feature 2: /note="The nucleotide in position 2 and the nucleotide in position 1 are linked through a phosphorothioate linkage"
  misc_feature 2: /note="The nucleotide in position 2 and the nucleotide in position 3 are linked through a phosphorothioate linkage"
  misc_feature 3: /note="C is a 2'-O-Methylcytidine (mC)"
  misc_feature 3: /note="The nucleotide in position 3 and the nucleotide in position 2 are linked through a phosphorothioate linkage"
  misc_feature 3: /note="The nucleotide in position 3 and the nucleotide in position 4 are linked through a phosphodiester linkage"
  misc_feature 4: /note="A is a 2'-fluoro-adenosine (fA)"
  misc_feature 4: /note="The nucleotide in position 4 and the nucleotide in position 5 are linked through a phosphodiester linkage"
  misc_feature 4: /note="The nucleotide in position 4 and the nucleotide in position 3 are linked through a phosphodiester linkage"
  misc_feature 5: /note="U is a 2'-O-Methyluridine (mU)"
  misc_feature 5: /note="The nucleotide in position 5 and the nucleotide in position 4 are linked through a phosphodiester linkage"
  misc_feature 5: /note="The nucleotide in position 5 and the nucleotide in position 6 are linked through a phosphodiester linkage"
  misc_feature 6: /note="A is a 2'-fluoro-adenosine (fA)"
  misc_feature 6: /note="The nucleotide in position 6 and the nucleotide in position 7 are linked through a phosphodiester linkage"
  misc_feature 6: /note="The nucleotide in position 6 and the nucleotide in position 5 are linked through a phosphodiester linkage"
  misc_feature 7: /note="U is a 2'-O-Methyluridine (mU)"
  misc_feature 7: /note="The nucleotide in position 7 and the nucleotide in position 8 are linked through a phosphodiester linkage"
  misc_feature 7: /note="The nucleotide in position 7 and the nucleotide in position 6 are linked through a phosphodiester linkage"
  misc_feature 8: /note="U is a 2'-fluoro-uridine (fU)"
  misc_feature 8: /note="The nucleotide in position 8 and the nucleotide in position 9 are linked through a phosphodiester linkage"
  misc_feature 8: /note="The nucleotide in position 8 and the nucleotide in position 7 are linked through a phosphodiester linkage"
  misc_feature 9: /note="A is a 2'-O-Methyladenosine (mA)"
  misc_feature 9: /note="The nucleotide in position 9 and the nucleotide in position 10 are linked through a phosphodiester linkage"
  misc_feature 9: /note="The nucleotide in position 9 and the nucleotide in position 8 are linked through a phosphodiester linkage"
  misc_feature 10: /note="A is a 2'-fluoro-adenosine (fA)"
  misc_feature 10: /note="The nucleotide in position 10 and the nucleotide in position 11 are linked through a phosphodiester linkage"
  misc_feature 10: /note="The nucleotide in position 10 and the nucleotide in position 9 are linked through a phosphodiester linkage"
  misc_feature 11: /note="U is a 2'-O-Methyluridine (mU)"
  misc_feature 11: /note="The nucleotide in position 11 and the nucleotide in position 12 are linked through a phosphodiester linkage"
  misc_feature 11: /note="The nucleotide in position 11 and the nucleotide in position 10 are linked through a phosphodiester linkage"
  misc_feature 12: /note="A is a 2'-fluoro-adenosine (fA)"
  misc_feature 12: /note="The nucleotide in position 12 and the nucleotide in position 13 are linked through a phosphodiester linkage"
  misc_feature 12: /note="The nucleotide in position 12 and the nucleotide in position 11 are linked through a phosphodiester linkage"
  misc_feature 13: /note="A is a 2'-O-Methyladenosine (mA)"
  misc_feature 13: /note="The nucleotide in position 13 and the nucleotide in position 14 are linked through a phosphodiester linkage"
  misc_feature 13: /note="The nucleotide in position 13 and the nucleotide in position 12 are linked through a phosphodiester linkage"
  misc_feature 14: /note="A is a 2'-fluoro-adenosine (fA)"
  misc_feature 14: /note="The nucleotide in position 14 and the nucleotide in position 15 are linked through a phosphodiester linkage"
  misc_feature 14: /note="The nucleotide in position 14 and the nucleotide in position 13 are linked through a phosphodiester linkage"
  misc_feature 15: /note="A is a 2'-O-Methyladenosine (mA)"
  misc_feature 15: /note="The nucleotide in position 15 and the nucleotide in position 16 are linked through a phosphodiester linkage"
  misc_feature 15: /note="The nucleotide in position 15 and the nucleotide in position 14 are linked through a phosphodiester linkage"
  misc_feature 16: /note="A is a 2'-fluoro-adenosine (fA)"
  misc_feature 16: /note="The nucleotide in position 16 and the nucleotide in position 17 are linked through a phosphodiester linkage"
  misc_feature 16: /note="The nucleotide in position 16 and the nucleotide in position 15 are linked through a phosphodiester linkage"
  misc_feature 17: /note="U is a 2'-O-Methyluridine (mU)"
  misc_feature 17: /note="The nucleotide in position 17 and the nucleotide in position 18 are linked through a phosphodiester linkage"
  misc_feature 17: /note="The nucleotide in position 17 and the nucleotide in position 16 are linked through a phosphodiester linkage"
  misc_feature 18: /note="G is a 2'-fluoro-guanosine (fG)"
  misc_feature 18: /note="The nucleotide in position 18 and the nucleotide in position 19 are linked through a phosphodiester linkage"
  misc_feature 18: /note="The nucleotide in position 18 and the nucleotide in position 17 are linked through a phosphodiester linkage"
  misc_feature 19: /note="The nucleotide in position 19 and the nucleotide in position 20 are linked through a phosphorothioate linkage"
  misc_feature 19: /note="C is a 2'-O-Methylcytidine (mC)"
  misc_feature 19: /note="The nucleotide in position 19 and the nucleotide in position 18 are linked through a phosphodiester linkage"
  misc_feature 20: /note="The nucleotide in position 20 and the nucleotide in position 21 are linked through a phosphorothioate linkage"
  misc_feature 20: /note="T is a deoxythymidine"
  misc_feature 20: /note="The nucleotide in position 20 and the nucleotide in position 19 are linked through a phosphorothioate linkage"
  misc_feature 21: /note="The nucleotide in position 21 and the nucleotide in position 20 are linked through a phosphorothioate linkage"
  misc_feature 21: /note="T is a deoxythymidine"
accauauuaauaaaaaugctt

SEQ ID NO: 611 - RNA, 21 nt, Artificial Sequence
  reverse C027.002#01; #06; #11; #20; #29; #34; #39; #48; #57; #62
  misc_feature 1: /note="A is a 2'-O-Methyladenosine (mA)"
  misc_feature 1: /note="The nucleotide in position 1 and the nucleotide in position 2 are linked through a phosphorothioate linkage"
  misc_feature 2: /note="C is a 2'-fluoro-cytidine (fC)"
  misc_feature 2: /note="The nucleotide in position 2 and the nucleotide in position 1 are linked through a phosphorothioate linkage"
  misc_feature 2: /note="The nucleotide in position 2 and the nucleotide in position 3 are linked through a phosphorothioate linkage"
  misc_feature 3: /note="C is a 2'-O-Methylcytidine (mC)"
  misc_feature 3: /note="The nucleotide in position 3 and the nucleotide in position 2 are linked through a phosphorothioate linkage"
  misc_feature 3: /note="The nucleotide in position 3 and the nucleotide in position 4 are linked through a phosphodiester linkage"
  misc_feature 4: /note="A is a 2'-fluoro-adenosine (fA)"
  misc_feature 4: /note="The nucleotide in position 4 and the nucleotide in position 5 are linked through a phosphodiester linkage"
  misc_feature 4: /note="The nucleotide in position 4 and the nucleotide in position 3 are linked through a phosphodiester linkage"
  misc_feature 5: /note="U is a 2'-O-Methyluridine (mU)"
  misc_feature 5: /note="The nucleotide in position 5 and the nucleotide in position 4 are linked through a phosphodiester linkage"
  misc_feature 5: /note="The nucleotide in position 5 and the nucleotide in position 6 are linked through a phosphodiester linkage"
  misc_feature 6: /note="A is a 2'-O-Methyladenosine (mA)"
  misc_feature 6: /note="The nucleotide in position 6 and the nucleotide in position 7 are linked through a phosphodiester linkage"
  misc_feature 6: /note="The nucleotide in position 6 and the nucleotide in position 5 are linked through a phosphodiester linkage"
  misc_feature 7: /note="U is a 2'-O-Methyluridine (mU)"
  misc_feature 7: /note="The nucleotide in position 7 and the nucleotide in position 8 are linked through a phosphodiester linkage"
  misc_feature 7: /note="The nucleotide in position 7 and the nucleotide in position 6 are linked through a phosphodiester linkage"
  misc_feature 8: /note="U is a 2'-O-Methyluridine (mU)"
  misc_feature 8: /note="The nucleotide in position 8 and the nucleotide in position 9 are linked through a phosphodiester linkage"
  misc_feature 8: /note="The nucleotide in position 8 and the nucleotide in position 7 are linked through a phosphodiester linkage"
  misc_feature 9: /note="A is a 2'-O-Methyladenosine (mA)"
  misc_feature 9: /note="The nucleotide in position 9 and the nucleotide in position 10 are linked through a phosphodiester linkage"
  misc_feature 9: /note="The nucleotide in position 9 and the nucleotide in position 8 are linked through a phosphodiester linkage"
  misc_feature 10: /note="A is a 2'-O-Methyladenosine (mA)"
  misc_feature 10: /note="The nucleotide in position 10 and the nucleotide in position 11 are linked through a phosphodiester linkage"
  misc_feature 10: /note="The nucleotide in position 10 and the nucleotide in position 9 are linked through a phosphodiester linkage"
  misc_feature 11: /note="U is a 2'-O-Methyluridine (mU)"
  misc_feature 11: /note="The nucleotide in position 11 and the nucleotide in position 12 are linked through a phosphodiester linkage"
  misc_feature 11: /note="The nucleotide in position 11 and the nucleotide in position 10 are linked through a phosphodiester linkage"
  misc_feature 12: /note="A is a 2'-O-Methyladenosine (mA)"
  misc_feature 12: /note="The nucleotide in position 12 and the nucleotide in position 13 are linked through a phosphodiester linkage"
  misc_feature 12: /note="The nucleotide in position 12 and the nucleotide in position 11 are linked through a phosphodiester linkage"
  misc_feature 13: /note="A is a 2'-O-Methyladenosine (mA)"
  misc_feature 13: /note="The nucleotide in position 13 and the nucleotide in position 14 are linked through a phosphodiester linkage"
  misc_feature 13: /note="The nucleotide in position 13 and the nucleotide in position 12 are linked through a phosphodiester linkage"
  misc_feature 14: /note="A is a 2'-fluoro-adenosine (fA)"
  misc_feature 14: /note="The nucleotide in position 14 and the nucleotide in position 15 are linked through a phosphodiester linkage"
  misc_feature 14: /note="The nucleotide in position 14 and the nucleotide in position 13 are linked through a phosphodiester linkage"
  misc_feature 15: /note="A is a 2'-O-Methyladenosine (mA)"
  misc_feature 15: /note="The nucleotide in position 15 and the nucleotide in position 16 are linked through a phosphodiester linkage"
  misc_feature 15: /note="The nucleotide in position 15 and the nucleotide in position 14 are linked through a phosphodiester linkage"
  misc_feature 16: /note="A is a 2'-fluoro-adenosine (fA)"
  misc_feature 16: /note="The nucleotide in position 16 and the nucleotide in position 17 are linked through a phosphodiester linkage"
  misc_feature 16: /note="The nucleotide in position 16 and the nucleotide in position 15 are linked through a phosphodiester linkage"
  misc_feature 17: /note="U is a 2'-O-Methyluridine (mU)"
  misc_feature 17: /note="The nucleotide in position 17 and the nucleotide in position 18 are linked through a phosphodiester linkage"
  misc_feature 17: /note="The nucleotide in position 17 and the nucleotide in position 16 are linked through a phosphodiester linkage"
  misc_feature 18: /note="G is a 2'-O-Methylguanosine (mG)"
  misc_feature 18: /note="The nucleotide in position 18 and the nucleotide in position 19 are linked through a phosphodiester linkage"
  misc_feature 18: /note="The nucleotide in position 18 and the nucleotide in position 17 are linked through a phosphodiester linkage"
  misc_feature 19: /note="The nucleotide in position 19 and the nucleotide in position 20 are linked through a phosphorothioate linkage"
  misc_feature 19: /note="C is a 2'-O-Methylcytidine (mC)"
  misc_feature 19: /note="The nucleotide in position 19 and the nucleotide in position 18 are linked through a phosphodiester linkage"
  misc_feature 20: /note="The nucleotide in position 20 and the nucleotide in position 21 are linked through a phosphorothioate linkage"
  misc_feature 20: /note="A is a 2'-O-Methyladenosine (mA)"
  misc_feature 20: /note="The nucleotide in position 20 and the nucleotide in position 19 are linked through a phosphorothioate linkage"
  misc_feature 21: /note="The nucleotide in position 21 and the nucleotide in position 20 are linked through a phosphorothioate linkage"
  misc_feature 21: /note="A is a 2'-O-Methyladenosine (mA)"
accauauuaauaaaaaugcaa

SEQ ID NO: 612 - RNA, 21 nt, Artificial Sequence
  reverse C027.002#02; #07; #12; #21; #30; #35; #40; #49; #58; #63
  misc_feature 1: /note="A is a 2'-O-Methyladenosine (mA)"
  misc_feature 1: /note="The nucleotide in position 1 and the nucleotide in position 2 are linked through a phosphorothioate linkage"
  misc_feature 2: /note="C is a 2'-fluoro-cytidine (fC)"
  misc_feature 2: /note="The nucleotide in position 2 and the nucleotide in position 1 are linked through a phosphorothioate linkage"
  misc_feature 2: /note="The nucleotide in position 2 and the nucleotide in position 3 are linked through a phosphorothioate linkage"
  misc_feature 3: /note="C is a 2'-O-Methylcytidine (mC)"
  misc_feature 3: /note="The nucleotide in position 3 and the nucleotide in position 2 are linked through a phosphorothioate linkage"
  misc_feature 3: /note="The nucleotide in position 3 and the nucleotide in position 4 are linked through a phosphodiester linkage"
  misc_feature 4: /note="A is a 2'-O-Methyladenosine (mA)"
  misc_feature 4: /note="The nucleotide in position 4 and the nucleotide in position 5 are linked through a phosphodiester linkage"
  misc_feature 4: /note="The nucleotide in position 4 and the nucleotide in position 3 are linked through a phosphodiester linkage"
  misc_feature 5: /note="U is a 2'-O-Methyluridine (mU)"
  misc_feature 5: /note="The nucleotide in position 5 and the nucleotide in position 4 are linked through a phosphodiester linkage"
  misc_feature 5: /note="The nucleotide in position 5 and the nucleotide in position 6 are linked through a phosphodiester linkage"
  misc_feature 6: /note="A is a 2'-fluoro-adenosine (fA)"
  misc_feature 6: /note="The nucleotide in position 6 and the nucleotide in position 7 are linked through a phosphodiester linkage"
  misc_feature 6: /note="The nucleotide in position 6 and the nucleotide in position 5 are linked through a phosphodiester linkage"
  misc_feature 7: /note="U is a 2'-O-Methyluridine (mU)"
  misc_feature 7: /note="The nucleotide in position 7 and the nucleotide in position 8 are linked through a phosphodiester linkage"
  misc_feature 7: /note="The nucleotide in position 7 and the nucleotide in position 6 are linked through a phosphodiester linkage"
  misc_feature 8: /note="U is a 2'-O-Methyluridine (mU)"
  misc_feature 8: /note="The nucleotide in position 8 and the nucleotide in position 9 are linked through a phosphodiester linkage"
  misc_feature 8: /note="The nucleotide in position 8 and the nucleotide in position 7 are linked through a phosphodiester linkage"
  misc_feature 9: /note="A is a 2'-O-Methyladenosine (mA)"
  misc_feature 9: /note="The nucleotide in position 9 and the nucleotide in position 10 are linked through a phosphodiester linkage"
  misc_feature 9: /note="The nucleotide in position 9 and the nucleotide in position 8 are linked through a phosphodiester linkage"
  misc_feature 10: /note="A is a 2'-O-Methyladenosine (mA)"
  misc_feature 10: /note="The nucleotide in position 10 and the nucleotide in position 11 are linked through a phosphodiester linkage"
  misc_feature 10: /note="The nucleotide in position 10 and the nucleotide in position 9 are linked through a phosphodiester linkage"
  misc_feature 11: /note="U is a 2'-O-Methyluridine (mU)"
  misc_feature 11: /note="The nucleotide in position 11 and the nucleotide in position 12 are linked through a phosphodiester linkage"
  misc_feature 11: /note="The nucleotide in position 11 and the nucleotide in position 10 are linked through a phosphodiester linkage"
  misc_feature 12: /note="A is a 2'-O-Methyladenosine (mA)"
  misc_feature 12: /note="The nucleotide in position 12 and the nucleotide in position 13 are linked through a phosphodiester linkage"
  misc_feature 12: /note="The nucleotide in position 12 and the nucleotide in position 11 are linked through a phosphodiester linkage"
  misc_feature 13: /note="A is a 2'-O-Methyladenosine (mA)"
  misc_feature 13: /note="The nucleotide in position 13 and the nucleotide in position 14 are linked through a phosphodiester linkage"
  misc_feature 13: /note="The nucleotide in position 13 and the nucleotide in position 12 are linked through a phosphodiester linkage"
  misc_feature 14: /note="A is a 2'-fluoro-adenosine (fA)"
  misc_feature 14: /note="The nucleotide in position 14 and the nucleotide in position 15 are linked through a phosphodiester linkage"
  misc_feature 14: /note="The nucleotide in position 14 and the nucleotide in position 13 are linked through a phosphodiester linkage"
  misc_feature 15: /note="A is a 2'-O-Methyladenosine (mA)"
  misc_feature 15: /note="The nucleotide in position 15 and the nucleotide in position 16 are linked through a phosphodiester linkage"
  misc_feature 15: /note="The nucleotide in position 15 and the nucleotide in position 14 are linked through a phosphodiester linkage"
  misc_feature 16: /note="A is a 2'-fluoro-adenosine (fA)"
  misc_feature 16: /note="The nucleotide in position 16 and the nucleotide in position 17 are linked through a phosphodiester linkage"
  misc_feature 16: /note="The nucleotide in position 16 and the nucleotide in position 15 are linked through a phosphodiester linkage"
  misc_feature 17: /note="U is a 2'-O-Methyluridine (mU)"
  misc_feature 17: /note="The nucleotide in position 17 and the nucleotide in position 18 are linked through a phosphodiester linkage"
  misc_feature 17: /note="The nucleotide in position 17 and the nucleotide in position 16 are linked through a phosphodiester linkage"
  misc_feature 18: /note="G is a 2'-O-Methylguanosine (mG)"
  misc_feature 18: /note="The nucleotide in position 18 and the nucleotide in position 19 are linked through a phosphodiester linkage"
  misc_feature 18: /note="The nucleotide in position 18 and the nucleotide in position 17 are linked through a phosphodiester linkage"
  misc_feature 19: /note="The nucleotide in position 19 and the nucleotide in position 20 are linked through a phosphorothioate linkage"
  misc_feature 19: /note="C is a 2'-O-Methylcytidine (mC)"
  misc_feature 19: /note="The nucleotide in position 19 and the nucleotide in position 18 are linked through a phosphodiester linkage"
  misc_feature 20: /note="The nucleotide in position 20 and the nucleotide in position 21 are linked through a phosphorothioate linkage"
  misc_feature 20: /note="A is a 2'-O-Methyladenosine (mA)"
  misc_feature 20: /note="The nucleotide in position 20 and the nucleotide in position 19 are linked through a phosphorothioate linkage"
  misc_feature 21: /note="The nucleotide in position 21 and the nucleotide in position 20 are linked through a phosphorothioate linkage"
  misc_feature 21: /note="A is a 2'-O-Methyladenosine (mA)"
accauauuaauaaaaaugcaa

SEQ ID NO: 613 - RNA, 21 nt, Artificial Sequence
  reverse C027.002#03; #08; #13; #22; #31; #36; #41; #50; #59; #64
  misc_feature 1: /note="A is a 2'-O-Methyladenosine (mA)"
  misc_feature 1: /note="The nucleotide in position 1 and the nucleotide in position 2 are linked through a phosphorothioate linkage"
  misc_feature 2: /note="C is a 2'-fluoro-cytidine (fC)"
  misc_feature 2: /note="The nucleotide in position 2 and the nucleotide in position 1 are linked through a phosphorothioate linkage"
  misc_feature 2: /note="The nucleotide in position 2 and the nucleotide in position 3 are linked through a phosphorothioate linkage"
  misc_feature 3: /note="C is a 2'-O-Methylcytidine (mC)"
  misc_feature 3: /note="The nucleotide in position 3 and the nucleotide in position 2 are linked through a phosphorothioate linkage"
  misc_feature 3: /note="The nucleotide in position 3 and the nucleotide in position 4 are linked through a phosphodiester linkage"
  misc_feature 4: /note="A is a 2'-fluoro-adenosine (fA)"
  misc_feature 4: /note="The nucleotide in position 4 and the nucleotide in position 5 are linked through a phosphodiester linkage"
  misc_feature 4: /note="The nucleotide in position 4 and the nucleotide in position 3 are linked through a phosphodiester linkage"
  misc_feature 5: /note="U is a 2'-O-Methyluridine (mU)"
  misc_feature 5: /note="The nucleotide in position 5 and the nucleotide in position 4 are linked through a phosphodiester linkage"
  misc_feature 5: /note="The nucleotide in position 5 and the nucleotide in position 6 are linked through a phosphodiester linkage"
  misc_feature 6: /note="A is a 2'-O-Methyladenosine (mA)"
  misc_feature 6: /note="The nucleotide in position 6 and the nucleotide in position 7 are linked through a phosphodiester linkage"
  misc_feature 6: /note="The nucleotide in position 6 and the nucleotide in position 5 are linked through a phosphodiester linkage"
  misc_feature 7: /note="U is a 2'-O-Methyluridine (mU)"
  misc_feature 7: /note="The nucleotide in position 7 and the nucleotide in position 8 are linked through a phosphodiester linkage"
  misc_feature 7: /note="The nucleotide in position 7 and the nucleotide in position 6 are linked through a phosphodiester linkage"
  misc_feature 8: /note="U is a 2'-fluoro-uridine (fU)"
  misc_feature 8: /note="The nucleotide in position 8 and the nucleotide in position 9 are linked through a phosphodiester linkage"
  misc_feature 8: /note="The nucleotide in position 8 and the nucleotide in position 7 are linked through a phosphodiester linkage"
  misc_feature 9: /note="A is a 2'-fluoro-adenosine (fA)"
  misc_feature 9: /note="The nucleotide in position 9 and the nucleotide in position 10 are linked through a phosphodiester linkage"
  misc_feature 9: /note="The nucleotide in position 9 and the nucleotide in position 8 are linked through a phosphodiester linkage"
  misc_feature 10: /note="A is a 2'-O-Methyladenosine (mA)"
  misc_feature 10: /note="The nucleotide in position 10 and the nucleotide in position 11 are linked through a phosphodiester linkage"
  misc_feature 10: /note="The nucleotide in position 10 and the nucleotide in position 9 are linked through a phosphodiester linkage"
  misc_feature 11: /note="U is a 2'-O-Methyluridine (mU)"
  misc_feature 11: /note="The nucleotide in position 11 and the nucleotide in position 12 are linked through a phosphodiester linkage"
  misc_feature 11: /note="The nucleotide in position 11 and the nucleotide in position 10 are linked through a phosphodiester linkage"
  misc_feature 12: /note="A is a 2'-O-Methyladenosine (mA)"
  misc_feature 12: /note="The nucleotide in position 12 and the nucleotide in position 13 are linked through a phosphodiester linkage"
  misc_feature 12: /note="The nucleotide in position 12 and the nucleotide in position 11 are linked through a phosphodiester linkage"
  misc_feature 13: /note="A is a 2'-O-Methyladenosine (mA)"
  misc_feature 13: /note="The nucleotide in position 13 and the nucleotide in position 14 are linked through a phosphodiester linkage"
  misc_feature 13: /note="The nucleotide in position 13 and the nucleotide in position 12 are linked through a phosphodiester linkage"
  misc_feature 14: /note="A is a 2'-fluoro-adenosine (fA)"
  misc_feature 14: /note="The nucleotide in position 14 and the nucleotide in position 15 are linked through a phosphodiester linkage"
  misc_feature 14: /note="The nucleotide in position 14 and the nucleotide in position 13 are linked through a phosphodiester linkage"
  misc_feature 15: /note="A is a 2'-O-Methyladenosine (mA)"
  misc_feature 15: /note="The nucleotide in position 15 and the nucleotide in position 16 are linked through a phosphodiester linkage"
  misc_feature 15: /note="The nucleotide in position 15 and the nucleotide in position 14 are linked through a phosphodiester linkage"
  misc_feature 16: /note="A is a 2'-fluoro-adenosine (fA)"
  misc_feature 16: /note="The nucleotide in position 16 and the nucleotide in position 17 are linked through a phosphodiester linkage"
  misc_feature 16: /note="The nucleotide in position 16 and the nucleotide in position 15 are linked through a phosphodiester linkage"
  misc_feature 17: /note="U is a 2'-O-Methyluridine (mU)"
  misc_feature 17: /note="The nucleotide in position 17 and the nucleotide in position 18 are linked through a phosphodiester linkage"
  misc_feature 17: /note="The nucleotide in position 17 and the nucleotide in position 16 are linked through a phosphodiester linkage"
  misc_feature 18: /note="G is a 2'-O-Methylguanosine (mG)"
  misc_feature 18: /note="The nucleotide in position 18 and the nucleotide in position 19 are linked through a phosphodiester linkage"
  misc_feature 18: /note="The nucleotide in position 18 and the nucleotide in position 17 are linked through a phosphodiester linkage"
  misc_feature 19: /note="The nucleotide in position 19 and the nucleotide in position 20 are linked through a phosphorothioate linkage"
  misc_feature 19: /note="C is a 2'-O-Methylcytidine (mC)"
  misc_feature 19: /note="The nucleotide in position 19 and the nucleotide in position 18 are linked through a phosphodiester linkage"
  misc_feature 20: /note="The nucleotide in position 20 and the nucleotide in position 21 are linked through a phosphorothioate linkage"
  misc_feature 20: /note="A is a 2'-O-Methyladenosine (mA)"
  misc_feature 20: /note="The nucleotide in position 20 and the nucleotide in position 19 are linked through a phosphorothioate linkage"
  misc_feature 21: /note="The nucleotide in position 21 and the nucleotide in position 20 are linked through a phosphorothioate linkage"
  misc_feature 21: /note="A is a 2'-O-Methyladenosine (mA)"
accauauuaauaaaaaugcaa

SEQ ID NO: 614 - RNA, 21 nt, Artificial Sequence
  reverse C027.002#04; #09; #14; #23; #32; #37; #42; #51; #60; #65
  misc_feature 1: /note="A is a 2'-O-Methyladenosine (mA)"
  misc_feature 1: /note="The nucleotide in position 1 and the nucleotide in position 2 are linked through a phosphorothioate linkage"
  misc_feature 2: /note="C is a 2'-fluoro-cytidine (fC)"
  misc_feature 2: /note="The nucleotide in position 2 and the nucleotide in position 1 are linked through a phosphorothioate linkage"
  misc_feature 2: /note="The nucleotide in position 2 and the nucleotide in position 3 are linked through a phosphorothioate linkage"
  misc_feature 3: /note="C is a 2'-O-Methylcytidine (mC)"
  misc_feature 3: /note="The nucleotide in position 3 and the nucleotide in position 2 are linked through a phosphorothioate linkage"
  misc_feature 3: /note="The nucleotide in position 3 and the nucleotide in position 4 are linked through a phosphodiester linkage"
  misc_feature 4: /note="A is a 2'-fluoro-adenosine (fA)"
  misc_feature 4: /note="The nucleotide in position 4 and the nucleotide in position 5 are linked through a phosphodiester linkage"
  misc_feature 4: /note="The nucleotide in position 4 and the nucleotide in position 3 are linked through a phosphodiester linkage"
  misc_feature 5: /note="U is a 2'-O-Methyluridine (mU)"
  misc_feature 5: /note="The nucleotide in position 5 and the nucleotide in position 4 are linked through a phosphodiester linkage"
  misc_feature 5: /note="The nucleotide in position 5 and the nucleotide in position 6 are linked through a phosphodiester linkage"
  misc_feature 6: /note="A is a 2'-O-Methyladenosine (mA)"
  misc_feature 6: /note="The nucleotide in position 6 and the nucleotide in position 7 are linked through a phosphodiester linkage"
  misc_feature 6: /note="The nucleotide in position 6 and the nucleotide in position 5 are linked through a phosphodiester linkage"
  misc_feature 7: /note="U is a 2'-O-Methyluridine (mU)"
  misc_feature 7: /note="The nucleotide in position 7 and the nucleotide in position 8 are linked through a phosphodiester linkage"
  misc_feature 7: /note="The nucleotide in position 7 and the nucleotide in position 6 are linked through a phosphodiester linkage"
  misc_feature 8: /note="U is a 2'-O-Methyluridine (mU)"
  misc_feature 8: /note="The nucleotide in position 8 and the nucleotide in position 9 are linked through a phosphodiester linkage"
  misc_feature 8: /note="The nucleotide in position 8 and the nucleotide in position 7 are linked through a phosphodiester linkage"
  misc_feature 9: /note="A is a 2'-fluoro-adenosine (fA)"
  misc_feature 9: /note="The nucleotide in position 9 and the nucleotide in position 10 are linked through a phosphodiester linkage"
  misc_feature 9: /note="The nucleotide in position 9 and the nucleotide in position 8 are linked through a phosphodiester linkage"
  misc_feature 10: /note="A is a 2'-O-Methyladenosine (mA)"
  misc_feature 10: /note="The nucleotide in position 10 and the nucleotide in position 11 are linked through a phosphodiester linkage"
  misc_feature 10: /note="The nucleotide in position 10 and the nucleotide in position 9 are linked through a phosphodiester linkage"
  misc_feature 11: /note="U is a 2'-O-Methyluridine (mU)"
  misc_feature 11: /note="The nucleotide in position 11 and the nucleotide in position 12 are linked through a phosphodiester linkage"
  misc_feature 11: /note="The nucleotide in position 11 and the nucleotide in position 10 are linked through a phosphodiester linkage"
  misc_feature 12: /note="A is a 2'-O-Methyladenosine (mA)"
  misc_feature 12: /note="The nucleotide in position 12 and the nucleotide in position 13 are linked through a phosphodiester linkage"
  misc_feature 12: /note="The nucleotide in position 12 and the nucleotide in position 11 are linked through a phosphodiester linkage"
  misc_feature 13: /note="A is a 2'-O-Methyladenosine (mA)"
  misc_feature 13: /note="The nucleotide in position 13 and the nucleotide in position 14 are linked through a phosphodiester linkage"
  misc_feature 13: /note="The nucleotide in position 13 and the nucleotide in position 12 are linked through a phosphodiester linkage"
  misc_feature 14: /note="A is a 2'-fluoro-adenosine (fA)"
  misc_feature 14: /note="The nucleotide in position 14 and the nucleotide in position 15 are linked through a phosphodiester linkage"
  misc_feature 14: /note="The nucleotide in position 14 and the nucleotide in position 13 are linked through a phosphodiester linkage"
  misc_feature 15: /note="A is a 2'-O-Methyladenosine (mA)"
  misc_feature 15: /note="The nucleotide in position 15 and the nucleotide in position 16 are linked through a phosphodiester linkage"
  misc_feature 15: /note="The nucleotide in position 15 and the nucleotide in position 14 are linked through a phosphodiester linkage"
  misc_feature 16: /note="A is a 2'-fluoro-adenosine (fA)"
  misc_feature 16: /note="The nucleotide in position 16 and the nucleotide in position 17 are linked through a phosphodiester linkage"
  misc_feature 16: /note="The nucleotide in position 16 and the nucleotide in position 15 are linked through a phosphodiester linkage"
  misc_feature 17: /note="U is a 2'-O-Methyluridine (mU)"
  misc_feature 17: /note="The nucleotide in position 17 and the nucleotide in position 18 are linked through a phosphodiester linkage"
  misc_feature 17: /note="The nucleotide in position 17 and the nucleotide in position 16 are linked through a phosphodiester linkage"
  misc_feature 18: /note="G is a 2'-O-Methylguanosine (mG)"
  misc_feature 18: /note="The nucleotide in position 18 and the nucleotide in position 19 are linked through a phosphodiester linkage"
  misc_feature 18: /note="The nucleotide in position 18 and the nucleotide in position 17 are linked through a phosphodiester linkage"
  misc_feature 19: /note="The nucleotide in position 19 and the nucleotide in position 20 are linked through a phosphorothioate linkage"
  misc_feature 19: /note="C is a 2'-O-Methylcytidine (mC)"
  misc_feature 19: /note="The nucleotide in position 19 and the nucleotide in position 18 are linked through a phosphodiester linkage"
  misc_feature 20: /note="The nucleotide in position 20 and the nucleotide in position 21 are linked through a phosphorothioate linkage"
  misc_feature 20: /note="A is a 2'-O-Methyladenosine (mA)"
  misc_feature 20: /note="The nucleotide in position 20 and the nucleotide in position 19 are linked through a phosphorothioate linkage"
  misc_feature 21: /note="The nucleotide in position 21 and the nucleotide in position 20 are linked through a phosphorothioate linkage"
  misc_feature 21: /note="A is a 2'-O-Methyladenosine (mA)"
accauauuaauaaaaaugcaa

SEQ ID NO: 615 - RNA, 21 nt, Artificial Sequence
  reverse C027.002#05; #10; #15; #24; #33; #38; #43; #52; #61; #66
  misc_feature 1: /note="A is a 2'-fluoro-adenosine (fA)"
  misc_feature 1: /note="The nucleotide in position 1 and the nucleotide in position 2 are linked through a phosphorothioate linkage"
  misc_feature 2: /note="C is a 2'-fluoro-cytidine (fC)"
  misc_feature 2: /note="The nucleotide in position 2 and the nucleotide in position 1 are linked through a phosphorothioate linkage"
  misc_feature 2: /note="The nucleotide in position 2 and the nucleotide in position 3 are linked through a phosphorothioate linkage"
  misc_feature 3: /note="C is a 2'-O-Methylcytidine (mC)"
  misc_feature 3: /note="The nucleotide in position 3 and the nucleotide in position 2 are linked through a phosphorothioate linkage"
  misc_feature 3: /note="The nucleotide in position 3 and the nucleotide in position 4 are linked through a phosphodiester linkage"
  misc_feature 4: /note="A is a 2'-fluoro-adenosine (fA)"
  misc_feature 4: /note="The nucleotide in position 4 and the nucleotide in position 5 are linked through a phosphodiester linkage"
  misc_feature 4: /note="The nucleotide in position 4 and the nucleotide in position 3 are linked through a phosphodiester linkage"
  misc_feature 5: /note="U is a 2'-O-Methyluridine (mU)"
  misc_feature 5: /note="The nucleotide in position 5 and the nucleotide in position 4 are linked through a phosphodiester linkage"
  misc_feature 5: /note="The nucleotide in position 5 and the nucleotide in position 6 are linked through a phosphodiester linkage"
  misc_feature 6: /note="A is a 2'-fluoro-adenosine (fA)"
  misc_feature 6: /note="The nucleotide in position 6 and the nucleotide in position 7 are linked through a phosphodiester linkage"
  misc_feature 6: /note="The nucleotide in position 6 and the nucleotide in position 5 are linked through a phosphodiester linkage"
  misc_feature 7: /note="U is a 2'-O-Methyluridine (mU)"
  misc_feature 7: /note="The nucleotide in position 7 and the nucleotide in position 8 are linked through a phosphodiester linkage"
  misc_feature 7: /note="The nucleotide in position 7 and the nucleotide in position 6 are linked through a phosphodiester linkage"
  misc_feature 8: /note="U is a 2'-fluoro-uridine (fU)"
  misc_feature 8: /note="The nucleotide in position 8 and the nucleotide in position 9 are linked through a phosphodiester linkage"
  misc_feature 8: /note="The nucleotide in position 8 and the nucleotide in position 7 are linked through a phosphodiester linkage"
  misc_feature 9: /note="A is a 2'-O-Methyladenosine (mA)"
  misc_feature 9: /note="The nucleotide in position 9 and the nucleotide in position 10 are linked through a phosphodiester linkage"
  misc_feature 9: /note="The nucleotide in position 9 and the nucleotide in position 8 are linked through a phosphodiester linkage"
  misc_feature 10: /note="A is a 2'-fluoro-adenosine (fA)"
  misc_feature 10: /note="The nucleotide in position 10 and the nucleotide in position 11 are linked through a phosphodiester linkage"
  misc_feature 10: /note="The nucleotide in position 10 and the nucleotide in position 9 are linked through a phosphodiester linkage"
  misc_feature 11: /note="U is a 2'-O-Methyluridine (mU)"
  misc_feature 11: /note="The nucleotide in position 11 and the nucleotide in position 12 are linked through a phosphodiester linkage"
  misc_feature 11: /note="The nucleotide in position 11 and the nucleotide in position 10 are linked through a phosphodiester linkage"
  misc_feature 12: /note="A is a 2'-O-Methyladenosine (mA)"
  misc_feature 12: /note="The nucleotide in position 12 and the nucleotide in position 13 are linked through a phosphodiester linkage"
  misc_feature 12: /note="The nucleotide in position 12 and the nucleotide in position 11 are linked through a phosphodiester linkage"
  misc_feature 13: /note="A is a 2'-O-Methyladenosine (mA)"
  misc_feature 13: /note="The nucleotide in position 13 and the nucleotide in position 14 are linked through a phosphodiester linkage"
  misc_feature 13: /note="The nucleotide in position 13 and the nucleotide in position 12 are linked through a phosphodiester linkage"
  misc_feature 14: /note="A is a 2'-fluoro-adenosine (fA)"
  misc_feature 14: /note="The nucleotide in position 14 and the nucleotide in position 15 are linked through a phosphodiester linkage"
  misc_feature 14: /note="The nucleotide in position 14 and the nucleotide in position 13 are linked through a phosphodiester linkage"
  misc_feature 15: /note="A is a 2'-O-Methyladenosine (mA)"
  misc_feature 15: /note="The nucleotide in position 15 and the nucleotide in position 16 are linked through a phosphodiester linkage"
  misc_feature 15: /note="The nucleotide in position 15 and the nucleotide in position 14 are linked through a phosphodiester linkage"
  misc_feature 16: /note="A is a 2'-fluoro-adenosine (fA)"
  misc_feature 16: /note="The nucleotide in position 16 and the nucleotide in position 17 are linked through a phosphodiester linkage"
  misc_feature 16: /note="The nucleotide in position 16 and the nucleotide in position 15 are linked through a phosphodiester linkage"
  misc_feature 17: /note="U is a 2'-O-Methyluridine (mU)"
  misc_feature 17: /note="The nucleotide in position 17 and the nucleotide in position 18 are linked through a phosphodiester linkage"
  misc_feature 17: /note="The nucleotide in position 17 and the nucleotide in position 16 are linked through a phosphodiester linkage"
  misc_feature 18: /note="G is a 2'-fluoro-guanosine (fG)"
  misc_feature 18: /note="The nucleotide in position 18 and the nucleotide in position 19 are linked through a phosphodiester linkage"
  misc_feature 18: /note="The nucleotide in position 18 and the nucleotide in position 17 are linked through a phosphodiester linkage"
  misc_feature 19: /note="The nucleotide in position 19 and the nucleotide in position 20 are linked through a phosphorothioate linkage"
  misc_feature 19: /note="C is a 2'-O-Methylcytidine (mC)"
  misc_feature 19: /note="The nucleotide in position 19 and the nucleotide in position 18 are linked through a phosphodiester linkage"
  misc_feature 20: /note="The nucleotide in position 20 and the nucleotide in position 21 are linked through a phosphorothioate linkage"
  misc_feature 20: /note="T is a deoxythymidine"
  misc_feature 20: /note="The nucleotide in position 20 and the nucleotide in position 19 are linked through a phosphorothioate linkage"
  misc_feature 21: /note="The nucleotide in position 21 and the nucleotide in position 20 are linked through a phosphorothioate linkage"
  misc_feature 21: /note="T is a deoxythymidine"
accauauuaauaaaaaugctt

SEQ ID NO: 616 - RNA, 21 nt, Artificial Sequence
  reverse C027.002#16; #25; #44; #53
  misc_feature 1: /note="A is a 2'-O-Methyladenosine (mA)"
  misc_feature 1: /note="The nucleotide in position 1 and the nucleotide in position 2 are linked through a phosphorothioate linkage"
  misc_feature 2: /note="C is a 2'-fluoro-cytidine (fC)"
  misc_feature 2: /note="The nucleotide in position 2 and the nucleotide in position 1 are linked through a phosphorothioate linkage"
  misc_feature 2: /note="The nucleotide in position 2 and the nucleotide in position 3 are linked through a phosphorothioate linkage"
  misc_feature 3: /note="C is a 2'-O-Methylcytidine (mC)"
  misc_feature 3: /note="The nucleotide in position 3 and the nucleotide in position 2 are linked through a phosphorothioate linkage"
  misc_feature 3: /note="The nucleotide in position 3 and the nucleotide in position 4 are linked through a phosphodiester linkage"
  misc_feature 4: /note="A is a 2'-fluoro-adenosine (fA)"
  misc_feature 4: /note="The nucleotide in position 4 and the nucleotide in position 5 are linked through a phosphodiester linkage"
  misc_feature 4: /note="The nucleotide in position 4 and the nucleotide in position 3 are linked through a phosphodiester linkage"
  misc_feature 5: /note="U is a 2'-O-Methyluridine (mU)"
  misc_feature 5: /note="The nucleotide in position 5 and the nucleotide in position 4 are linked through a phosphodiester linkage"
  misc_feature 5: /note="The nucleotide in position 5 and the nucleotide in position 6 are linked through a phosphodiester linkage"
  misc_feature 6: /note="A is a 2'-O-Methyladenosine (mA)"
  misc_feature 6: /note="The nucleotide in position 6 and the nucleotide in position 7 are linked through a phosphodiester linkage"
  misc_feature 6: /note="The nucleotide in position 6 and the nucleotide in position 5 are linked through a phosphodiester linkage"
  misc_feature 7: /note="U is a 2'-O-Methyluridine (mU)"
  misc_feature 7: /note="The nucleotide in position 7 and the nucleotide in position 8 are linked through a phosphodiester linkage"
  misc_feature 7: /note="The nucleotide in position 7 and the nucleotide in position 6 are linked through a phosphodiester linkage"
  misc_feature 8: /note="U is a 2'-O-Methyluridine (mU)"
  misc_feature 8: /note="The nucleotide in position 8 and the nucleotide in position 9 are linked through a phosphodiester linkage"
  misc_feature 8: /note="The nucleotide in position 8 and the nucleotide in position 7 are linked through a phosphodiester linkage"
  misc_feature 9: /note="A is a 2'-O-Methyladenosine (mA)"
  misc_feature 9: /note="The nucleotide in position 9 and the nucleotide in position 10 are linked through a phosphodiester linkage"
  misc_feature 9: /note="The nucleotide in position 9 and the nucleotide in position 8 are linked through a phosphodiester linkage"
  misc_feature 10: /note="A is a 2'-O-Methyladenosine (mA)"
  misc_feature 10: /note="The nucleotide in position 10 and the nucleotide in position 11 are linked through a phosphodiester linkage"
  misc_feature 10: /note="The nucleotide in position 10 and the nucleotide in position 9 are linked through a phosphodiester linkage"
  misc_feature 11: /note="U is a 2'-O-Methyluridine (mU)"
  misc_feature 11: /note="The nucleotide in position 11 and the nucleotide in position 12 are linked through a phosphodiester linkage"
  misc_feature 11: /note="The nucleotide in position 11 and the nucleotide in position 10 are linked through a phosphodiester linkage"
  misc_feature 12: /note="A is a 2'-O-Methyladenosine (mA)"
  misc_feature 12: /note="The nucleotide in position 12 and the nucleotide in position 13 are linked through a phosphodiester linkage"
  misc_feature 12: /note="The nucleotide in position 12 and the nucleotide in position 11 are linked through a phosphodiester linkage"
  misc_feature 13: /note="A is a 2'-O-Methyladenosine (mA)"
  misc_feature 13: /note="The nucleotide in position 13 and the nucleotide in position 14 are linked through a phosphodiester linkage"
  misc_feature 13: /note="The nucleotide in position 13 and the nucleotide in position 12 are linked through a phosphodiester linkage"
  misc_feature 14: /note="A is a 2'-fluoro-adenosine (fA)"
  misc_feature 14: /note="The nucleotide in position 14 and the nucleotide in position 15 are linked through a phosphodiester linkage"
  misc_feature 14: /note="The nucleotide in position 14 and the nucleotide in position 13 are linked through a phosphodiester linkage"
  misc_feature 15: /note="A is a 2'-O-Methyladenosine (mA)"
  misc_feature 15: /note="The nucleotide in position 15 and the nucleotide in position 16 are linked through a phosphodiester linkage"
  misc_feature 15: /note="The nucleotide in position 15 and the nucleotide in position 14 are linked through a phosphodiester linkage"
  misc_feature 16: /note="A is a 2'-fluoro-adenosine (fA)"
  misc_feature 16: /note="The nucleotide in position 16 and the nucleotide in position 17 are linked through a phosphodiester linkage"
  misc_feature 16: /note="The nucleotide in position 16 and the nucleotide in position 15 are linked through a phosphodiester linkage"
  misc_feature 17: /note="U is a 2'-O-Methyluridine (mU)"
  misc_feature 17: /note="The nucleotide in position 17 and the nucleotide in position 18 are linked through a phosphodiester linkage"
  misc_feature 17: /note="The nucleotide in position 17 and the nucleotide in position 16 are linked through a phosphodiester linkage"
  misc_feature 18: /note="G is a 2'-O-Methylguanosine (mG)"
  misc_feature 18: /note="The nucleotide in position 18 and the nucleotide in position 19 are linked through a phosphodiester linkage"
  misc_feature 18: /note="The nucleotide in position 18 and the nucleotide in position 17 are linked through a phosphodiester linkage"
  misc_feature 19: /note="The nucleotide in position 19 and the nucleotide in position 20 are linked through a phosphorothioate linkage"
  misc_feature 19: /note="C is a 2'-O-Methylcytidine (mC)"
  misc_feature 19: /note="The nucleotide in position 19 and the nucleotide in position 18 are linked through a phosphodiester linkage"
  misc_feature 20: /note="The nucleotide in position 20 and the nucleotide in position 21 are linked through a phosphorothioate linkage"
  misc_feature 20: /note="A is a locked adenine (lA)"
  misc_feature 20: /note="The nucleotide in position 20 and the nucleotide in position 19 are linked through a phosphorothioate linkage"
  misc_feature 21: /note="The nucleotide in position 21 and the nucleotide in position 20 are linked through a phosphorothioate linkage"
  misc_feature 21: /note="A is a locked adenine (lA)"
accauauuaauaaaaaugcaa

SEQ ID NO: 617 - RNA, 21 nt, Artificial Sequence
  reverse C027.002#17; #26; #45; #54
  misc_feature 1: /note="A is a 2'-O-Methyladenosine (mA)"
  misc_feature 1: /note="The nucleotide in position 1 and the nucleotide in position 2 are linked through a phosphorothioate linkage"
  misc_feature 2: /note="C is a 2'-fluoro-cytidine (fC)"
  misc_feature 2: /note="The nucleotide in position 2 and the nucleotide in position 1 are linked through a phosphorothioate linkage"
  misc_feature 2: /note="The nucleotide in position 2 and the nucleotide in position 3 are linked through a phosphorothioate linkage"
  misc_feature 3: /note="C is a 2'-O-Methylcytidine (mC)"
  misc_feature 3: /note="The nucleotide in position 3 and the nucleotide in position 2 are linked through a phosphorothioate linkage"
  misc_feature 3: /note="The nucleotide in position 3 and the nucleotide in position 4 are linked through a phosphodiester linkage"
  misc_feature 4: /note="A is a 2'-O-Methyladenosine (mA)"
  misc_feature 4: /note="The nucleotide in position 4 and the nucleotide in position 5 are linked through a phosphodiester linkage"
  misc_feature 4: /note="The nucleotide in position 4 and the nucleotide in position 3 are linked through a phosphodiester linkage"
  misc_feature 5: /note="U is a 2'-O-Methyluridine (mU)"
  misc_feature 5: /note="The nucleotide in position 5 and the nucleotide in position 4 are linked through a phosphodiester linkage"
  misc_feature 5: /note="The nucleotide in position 5 and the nucleotide in position 6 are linked through a phosphodiester linkage"
  misc_feature 6: /note="A is a 2'-fluoro-adenosine (fA)"
  misc_feature 6: /note="The nucleotide in position 6 and the nucleotide in position 7 are linked through a phosphodiester linkage"
  misc_feature 6: /note="The nucleotide in position 6 and the nucleotide in position 5 are linked through a phosphodiester linkage"
  misc_feature 7: /note="U is a 2'-O-Methyluridine (mU)"
  misc_feature 7: /note="The nucleotide in position 7 and the nucleotide in position 8 are linked through a phosphodiester linkage"
  misc_feature 7: /note="The nucleotide in position 7 and the nucleotide in position 6 are linked through a phosphodiester linkage"
  misc_feature 8: /note="U is a 2'-O-Methyluridine (mU)"
  misc_feature 8: /note="The nucleotide in position 8 and the nucleotide in position 9 are linked through a phosphodiester linkage"
  misc_feature 8: /note="The nucleotide in position 8 and the nucleotide in position 7 are linked through a phosphodiester linkage"
  misc_feature 9: /note="A is a 2'-O-Methyladenosine (mA)"
  misc_feature 9: /note="The nucleotide in position 9 and the nucleotide in position 10 are linked through a phosphodiester linkage"
  misc_feature 9: /note="The nucleotide in position 9 and the nucleotide in position 8 are linked through a phosphodiester linkage"
  misc_feature 10: /note="A is a 2'-O-Methyladenosine (mA)"
  misc_feature 10: /note="The nucleotide in position 10 and the nucleotide in position 11 are linked through a phosphodiester linkage"
  misc_feature 10: /note="The nucleotide in position 10 and the nucleotide in position 9 are linked through a phosphodiester linkage"
  misc_feature 11: /note="U is a 2'-O-Methyluridine (mU)"
  misc_feature 11: /note="The nucleotide in position 11 and the nucleotide in position 12 are linked through a phosphodiester linkage"
  misc_feature 11: /note="The nucleotide in position 11 and the nucleotide in position 10 are linked through a phosphodiester linkage"
  misc_feature 12: /note="A is a 2'-O-Methyladenosine (mA)"
  misc_feature 12: /note="The nucleotide in position 12 and the nucleotide in position 13 are linked through a phosphodiester linkage"
  misc_feature 12: /note="The nucleotide in position 12 and the nucleotide in position 11 are linked through a phosphodiester linkage"
  misc_feature 13: /note="A is a 2'-O-Methyladenosine (mA)"
  misc_feature 13: /note="The nucleotide in position 13 and the nucleotide in position 14 are linked through a phosphodiester linkage"
  misc_feature 13: /note="The nucleotide in position 13 and the nucleotide in position 12 are linked through a phosphodiester linkage"
  misc_feature 14: /note="A is a 2'-fluoro-adenosine (fA)"
  misc_feature 14: /note="The nucleotide in position 14 and the nucleotide in position 15 are linked through a phosphodiester linkage"
  misc_feature 14: /note="The nucleotide in position 14 and the nucleotide in position 13 are linked through a phosphodiester linkage"
  misc_feature 15: /note="A is a 2'-O-Methyladenosine (mA)"
  misc_feature 15: /note="The nucleotide in position 15 and the nucleotide in position 16 are linked through a phosphodiester linkage"
  misc_feature 15: /note="The nucleotide in position 15 and the nucleotide in position 14 are linked through a phosphodiester linkage"
  misc_feature 16: /note="A is a 2'-fluoro-adenosine (fA)"
  misc_feature 16: /note="The nucleotide in position 16 and the nucleotide in position 17 are linked through a phosphodiester linkage"
  misc_feature 16: /note="The nucleotide in position 16 and the nucleotide in position 15 are linked through a phosphodiester linkage"
  misc_feature 17: /note="U is a 2'-O-Methyluridine (mU)"
  misc_feature 17: /note="The nucleotide in position 17 and the nucleotide in position 18 are linked through a phosphodiester linkage"
  misc_feature 17: /note="The nucleotide in position 17 and the nucleotide in position 16 are linked through a phosphodiester linkage"
  misc_feature 18: /note="G is a 2'-O-Methylguanosine (mG)"
  misc_feature 18: /note="The nucleotide in position 18 and the nucleotide in position 19 are linked through a phosphodiester linkage"
  misc_feature 18: /note="The nucleotide in position 18 and the nucleotide in position 17 are linked through a phosphodiester linkage"
  misc_feature 19: /note="The nucleotide in position 19 and the nucleotide in position 20 are linked through a phosphorothioate linkage"
  misc_feature 19: /note="C is a 2'-O-Methylcytidine (mC)"
  misc_feature 19: /note="The nucleotide in position 19 and the nucleotide in position 18 are linked through a phosphodiester linkage"
  misc_feature 20: /note="The nucleotide in position 20 and the nucleotide in position 21 are linked through a phosphorothioate linkage"
  misc_feature 20: /note="A is a locked adenine (lA)"
  misc_feature 20: /note="The nucleotide in position 20 and the nucleotide in position 19 are linked through a phosphorothioate linkage"
  misc_feature 21: /note="The nucleotide in position 21 and the nucleotide in position 20 are linked through a phosphorothioate linkage"
  misc_feature 21: /note="A is a locked adenine (lA)"
accauauuaauaaaaaugcaa

SEQ ID NO: 618 - RNA, 21 nt, Artificial Sequence
  reverse C027.002#18; #27; #46; #55
  misc_feature 1: /note="A is a 2'-O-Methyladenosine (mA)"
  misc_feature 1: /note="The nucleotide in position 1 and the nucleotide in position 2 are linked through a phosphorothioate linkage"
  misc_feature 2: /note="C is a 2'-fluoro-cytidine (fC)"
  misc_feature 2: /note="The nucleotide in position 2 and the nucleotide in position 1 are linked through a phosphorothioate linkage"
  misc_feature 2: /note="The nucleotide in position 2 and the nucleotide in position 3 are linked through a phosphorothioate linkage"
  misc_feature 3: /note="C is a 2'-O-Methylcytidine (mC)"
  misc_feature 3: /note="The nucleotide in position 3 and the nucleotide in position 2 are linked through a phosphorothioate linkage"
  misc_feature 3: /note="The nucleotide in position 3 and the nucleotide in position 4 are linked through a phosphodiester linkage"
  misc_feature 4: /note="A is a 2'-fluoro-adenosine (fA)"
  misc_feature 4: /note="The nucleotide in position 4 and the nucleotide in position 5 are linked through a phosphodiester linkage"
  misc_feature 4: /note="The nucleotide in position 4 and the nucleotide in position 3 are linked through a phosphodiester linkage"
  misc_feature 5: /note="U is a 2'-O-Methyluridine (mU)"
  misc_feature 5: /note="The nucleotide in position 5 and the nucleotide in position 4 are linked through a phosphodiester linkage"
  misc_feature 5: /note="The nucleotide in position 5 and the nucleotide in position 6 are linked through a phosphodiester linkage"
  misc_feature 6: /note="A is a 2'-O-Methyladenosine (mA)"
  misc_feature 6: /note="The nucleotide in position 6 and the nucleotide in position 7 are linked through a phosphodiester linkage"
  misc_feature 6: /note="The nucleotide in position 6 and the nucleotide in position 5 are linked through a phosphodiester linkage"
  misc_feature 7: /note="U is a 2'-O-Methyluridine (mU)"
  misc_feature 7: /note="The nucleotide in position 7 and the nucleotide in position 8 are linked through a phosphodiester linkage"
  misc_feature 7: /note="The nucleotide in position 7 and the nucleotide in position 6 are linked through a phosphodiester linkage"
  misc_feature 8: /note="U is a 2'-fluoro-uridine (fU)"
  misc_feature 8: /note="The nucleotide in position 8 and the nucleotide in position 9 are linked through a phosphodiester linkage"
  misc_feature 8: /note="The nucleotide in position 8 and the nucleotide in position 7 are linked through a phosphodiester linkage"
  misc_feature 9: /note="A is a 2'-fluoro-adenosine (fA)"
  misc_feature 9: /note="The nucleotide in position 9 and the nucleotide in position 10 are linked through a phosphodiester linkage"
  misc_feature 9: /note="The nucleotide in position 9 and the nucleotide in position 8 are linked through a phosphodiester linkage"
  misc_feature 10: /note="A is a 2'-O-Methyladenosine (mA)"
  misc_feature 10: /note="The nucleotide in position 10 and the nucleotide in position 11 are linked through a phosphodiester linkage"
  misc_feature 10: /note="The nucleotide in position 10 and the nucleotide in position 9 are linked through a phosphodiester linkage"
  misc_feature 11: /note="U is a 2'-O-Methyluridine (mU)"
  misc_feature 11: /note="The nucleotide in position 11 and the nucleotide in position 12 are linked through a phosphodiester linkage"
  misc_feature 11: /note="The nucleotide in position 11 and the nucleotide in position 10 are linked through a phosphodiester linkage"
  misc_feature 12: /note="A is a 2'-O-Methyladenosine (mA)"
  misc_feature 12: /note="The nucleotide in position 12 and the nucleotide in position 13 are linked through a phosphodiester linkage"
  misc_feature 12: /note="The nucleotide in position 12 and the nucleotide in position 11 are linked through a phosphodiester linkage"
  misc_feature 13: /note="A is a 2'-O-Methyladenosine (mA)"
  misc_feature 13: /note="The nucleotide in position 13 and the nucleotide in position 14 are linked through a phosphodiester linkage"
  misc_feature 13: /note="The nucleotide in position 13 and the nucleotide in position 12 are linked through a phosphodiester linkage"
  misc_feature 14: /note="A is a 2'-fluoro-adenosine (fA)"
  misc_feature 14: /note="The nucleotide in position 14 and the nucleotide in position 15 are linked through a phosphodiester linkage"
  misc_feature 14: /note="The nucleotide in position 14 and the nucleotide in position 13 are linked through a phosphodiester linkage"
  misc_feature 15: /note="A is a 2'-O-Methyladenosine (mA)"
  misc_feature 15: /note="The nucleotide in position 15 and the nucleotide in position 16 are linked through a phosphodiester linkage"
  misc_feature 15: /note="The nucleotide in position 15 and the nucleotide in position 14 are linked through a phosphodiester linkage"
  misc_feature 16: /note="A is a 2'-fluoro-adenosine (fA)"
  misc_feature 16: /note="The nucleotide in position 16 and the nucleotide in position 17 are linked through a phosphodiester linkage"
  misc_feature 16: /note="The nucleotide in position 16 and the nucleotide in position 15 are linked through a phosphodiester linkage"
  misc_feature 17: /note="U is a 2'-O-Methyluridine (mU)"
  misc_feature 17: /note="The nucleotide in position 17 and the nucleotide in position 18 are linked through a phosphodiester linkage"
  misc_feature 17: /note="The nucleotide in position 17 and the nucleotide in position 16 are linked through a phosphodiester linkage"
  misc_feature 18: /note="G is a 2'-O-Methylguanosine (mG)"
  misc_feature 18: /note="The nucleotide in position 18 and the nucleotide in position 19 are linked through a phosphodiester linkage"
  misc_feature 18: /note="The nucleotide in position 18 and the nucleotide in position 17 are linked through a phosphodiester linkage"
  misc_feature 19: /note="The nucleotide in position 19 and the nucleotide in position 20 are linked through a phosphorothioate linkage"
  misc_feature 19: /note="C is a 2'-O-Methylcytidine (mC)"
  misc_feature 19: /note="The nucleotide in position 19 and the nucleotide in position 18 are linked through a phosphodiester linkage"
  misc_feature 20: /note="The nucleotide in position 20 and the nucleotide in position 21 are linked through a phosphorothioate linkage"
  misc_feature 20: /note="A is a locked adenine (lA)"
  misc_feature 20: /note="The nucleotide in position 20 and the nucleotide in position 19 are linked through a phosphorothioate linkage"
  misc_feature 21: /note="The nucleotide in position 21 and the nucleotide in position 20 are linked through a phosphorothioate linkage"
  misc_feature 21: /note="A is a locked adenine (lA)"
accauauuaauaaaaaugcaa

SEQ ID NO: 619 - RNA, 21 nt, Artificial Sequence
  reverse C027.002#19; #28; #47; #56
  misc_feature 1: /note="A is a 2'-O-Methyladenosine (mA)"
  misc_feature 1: /note="The nucleotide in position 1 and the nucleotide in position 2 are linked through a phosphorothioate linkage"
  misc_feature 2: /note="C is a 2'-fluoro-cytidine (fC)"
  misc_feature 2: /note="The nucleotide in position 2 and the nucleotide in position 1 are linked through a phosphorothioate linkage"
  misc_feature 2: /note="The nucleotide in position 2 and the nucleotide in position 3 are linked through a phosphorothioate linkage"
  misc_feature 3: /note="C is a 2'-O-Methylcytidine (mC)"
  misc_feature 3: /note="The nucleotide in position 3 and the nucleotide in position 2 are linked through a phosphorothioate linkage"
  misc_feature 3: /note="The nucleotide in position 3 and the nucleotide in position 4 are linked through a phosphodiester linkage"
  misc_feature 4: /note="A is a 2'-fluoro-adenosine (fA)"
  misc_feature 4: /note="The nucleotide in position 4 and the nucleotide in position 5 are linked through a phosphodiester linkage"
  misc_feature 4: /note="The nucleotide in position 4 and the nucleotide in position 3 are linked through a phosphodiester linkage"
  misc_feature 5: /note="U is a 2'-O-Methyluridine (mU)"
  misc_feature 5: /note="The nucleotide in position 5 and the nucleotide in position 4 are linked through a phosphodiester linkage"
  misc_feature 5: /note="The nucleotide in position 5 and the nucleotide in position 6 are linked through a phosphodiester linkage"
  misc_feature 6: /note="A is a 2'-O-Methyladenosine (mA)"
  misc_feature 6: /note="The nucleotide in position 6 and the nucleotide in position 7 are linked through a phosphodiester linkage"
  misc_feature 6: /note="The nucleotide in position 6 and the nucleotide in position 5 are linked through a phosphodiester linkage"
  misc_feature 7: /note="U is a 2'-O-Methyluridine (mU)"
  misc_feature 7: /note="The nucleotide in position 7 and the nucleotide in position 8 are linked through a phosphodiester linkage"
  misc_feature 7: /note="The nucleotide in position 7 and the nucleotide in position 6 are linked through a phosphodiester linkage"
  misc_feature 8: /note="U is a 2'-O-Methyluridine (mU)"
  misc_feature 8: /note="The nucleotide in position 8 and the nucleotide in position 9 are linked through a phosphodiester linkage"
  misc_feature 8: /note="The nucleotide in position 8 and the nucleotide in position 7 are linked through a phosphodiester linkage"
  misc_feature 9: /note="A is a 2'-fluoro-adenosine (fA)"
  misc_feature 9: /note="The nucleotide in position 9 and the nucleotide in position 10 are linked through a phosphodiester linkage"
  misc_feature 9: /note="The nucleotide in position 9 and the nucleotide in position 8 are linked through a phosphodiester linkage"
  misc_feature 10: /note="A is a 2'-O-Methyladenosine (mA)"
  misc_feature 10: /note="The nucleotide in position 10 and the nucleotide in position 11 are linked through a phosphodiester linkage"
  misc_feature 10: /note="The nucleotide in position 10 and the nucleotide in position 9 are linked through a phosphodiester linkage"
  misc_feature 11: /note="U is a 2'-O-Methyluridine (mU)"
  misc_feature 11: /note="The nucleotide in position 11 and the nucleotide in position 12 are linked through a phosphodiester linkage"
  misc_feature 11: /note="The nucleotide in position 11 and the nucleotide in position 10 are linked through a phosphodiester linkage"
  misc_feature 12: /note="A is a 2'-O-Methyladenosine (mA)"
  misc_feature 12: /note="The nucleotide in position 12 and the nucleotide in position 13 are linked through a phosphodiester linkage"
  misc_feature 12: /note="The nucleotide in position 12 and the nucleotide in position 11 are linked through a phosphodiester linkage"
  misc_feature 13: /note="A is a 2'-O-Methyladenosine (mA)"
  misc_feature 13: /note="The nucleotide in position 13 and the nucleotide in position 14 are linked through a phosphodiester linkage"
  misc_feature 13: /note="The nucleotide in position 13 and the nucleotide in position 12 are linked through a phosphodiester linkage"
  misc_feature 14: /note="A is a 2'-fluoro-adenosine (fA)"
  misc_feature 14: /note="The nucleotide in position 14 and the nucleotide in position 15 are linked through a phosphodiester linkage"
  misc_feature 14: /note="The nucleotide in position 14 and the nucleotide in position 13 are linked through a phosphodiester linkage"
  misc_feature 15: /note="A is a 2'-O-Methyladenosine (mA)"
  misc_feature 15: /note="The nucleotide in position 15 and the nucleotide in position 16 are linked through a phosphodiester linkage"
  misc_feature 15: /note="The nucleotide in position 15 and the nucleotide in position 14 are linked through a phosphodiester linkage"
  misc_feature 16: /note="A is a 2'-fluoro-adenosine (fA)"
  misc_feature 16: /note="The nucleotide in position 16 and the nucleotide in position 17 are linked through a phosphodiester linkage"
  misc_feature 16: /note="The nucleotide in position 16 and the nucleotide in position 15 are linked through a phosphodiester linkage"
  misc_feature 17: /note="U is a 2'-O-Methyluridine (mU)"
  misc_feature 17: /note="The nucleotide in position 17 and the nucleotide in position 18 are linked through a phosphodiester linkage"
  misc_feature 17: /note="The nucleotide in position 17 and the nucleotide in position 16 are linked through a phosphodiester linkage"
  misc_feature 18: /note="G is a 2'-O-Methylguanosine (mG)"
  misc_feature 18: /note="The nucleotide in position 18 and the nucleotide in position 19 are linked through a phosphodiester linkage"
  misc_feature 18: /note="The nucleotide in position 18 and the nucleotide in position 17 are linked through a phosphodiester linkage"
  misc_feature 19: /note="The nucleotide in position 19 and the nucleotide in position 20 are linked through a phosphorothioate linkage"
  misc_feature 19: /note="C is a 2'-O-Methylcytidine (mC)"
  misc_feature 19: /note="The nucleotide in position 19 and the nucleotide in position 18 are linked through a phosphodiester linkage"
  misc_feature 20: /note="The nucleotide in position 20 and the nucleotide in position 21 are linked through a phosphorothioate linkage"
  misc_feature 20: /note="A is a locked adenine (lA)"
  misc_feature 20: /note="The nucleotide in position 20 and the nucleotide in position 19 are linked through a phosphorothioate linkage"
  misc_feature 21: /note="The nucleotide in position 21 and the nucleotide in position 20 are linked through a phosphorothioate linkage"
  misc_feature 21: /note="A is a locked adenine (lA)"
accauauuaauaaaaaugcaa

SEQ ID NO: 620 - RNA, 22 nt, Artificial Sequence
  Forward C027.003
  misc_feature 1: /note="T is a lgT3 nucleotide analog"
  misc_feature 1: /note="The nucleotide in position 1 and the nucleotide in position 2 are linked through a phosphodiester linkage"
  misc_feature 2: /note="T is a lgT3 nucleotide analog"
  misc_feature 2: /note="The nucleotide in position 2 and the nucleotide in position 1 are linked through a phosphodiester linkage"
  misc_feature 2: /note="The nucleotide in position 2 and the nucleotide in position 3 are linked through a phosphodiester linkage"
  misc_feature 3: /note="T is a lgT3 nucleotide analog"
  misc_feature 3: /note="The nucleotide in position 3 and the nucleotide in position 2 are linked through a phosphodiester linkage"
  misc_feature 3: /note="The nucleotide in position 3 and the nucleotide in position 4 are linked through a phosphodiester linkage"
  misc_feature 4: /note="U is a 2'-fluoro-uridine (fU)"
  misc_feature 4: /note="The nucleotide in position 4 and the nucleotide in position 3 are linked through a phosphodiester linkage"
  misc_feature 4: /note="The nucleotide in position 4 and the nucleotide in position 5 are linked through a phosphodiester linkage"
  misc_feature 5: /note="U is a 2'-O-Methyluridine (mU)"
  misc_feature 5: /note="The nucleotide in position 5 and the nucleotide in position 4 are linked through a phosphodiester linkage"
  misc_feature 5: /note="The nucleotide in position 5 and the nucleotide in position 6 are linked through a phosphodiester linkage"
  misc_feature 6: /note="A is a 2'-fluoro-adenosine (fA)"
  misc_feature 6: /note="The nucleotide in position 6 and the nucleotide in position 5 are linked through a phosphodiester linkage"
  misc_feature 6: /note="The nucleotide in position 6 and the nucleotide in position 7 are linked through a phosphodiester linkage"
  misc_feature 7: /note="U is a 2'-O-Methyluridine (mU)"
  misc_feature 7: /note="The nucleotide in position 7 and the nucleotide in position 6 are linked through a phosphodiester linkage"
  misc_feature 7: /note="The nucleotide in position7 and the nucleotide in position 8 are linked through a phosphodiester linkage"
  misc_feature 8: /note="U is a 2'-fluoro-uridine (fU)"
  misc_feature 8: /note="The nucleotide in position 8 and the nucleotide in position 7 are linked through a phosphodiester linkage"
  misc_feature 8: /note="The nucleotide in position 8 and the nucleotide in position 9 are linked through a phosphodiester linkage"
  misc_feature 9: /note="A is a 2'-O-Methyladenosine (mA)"
  misc_feature 9: /note="The nucleotide in position 9 and the nucleotide in position 8 are linked through a phosphodiester linkage"
  misc_feature 9: /note="The nucleotide in position 9 and the nucleotide in position 10 are linked through a phosphodiester linkage"
  misc_feature 10: /note="A is a 2'-fluoro-adenosine (fA)"
  misc_feature 10: /note="The nucleotide in position 10 and the nucleotide in position 9 are linked through a phosphodiester linkage"
  misc_feature 10: /note="The nucleotide in position 10 and the nucleotide in position 11 are linked through a phosphodiester linkage"
  misc_feature 11: /note="U is a 2'-O-Methyluridine (mU)"
  misc_feature 11: /note="The nucleotide in position 11 and the nucleotide in position 10 are linked through a phosphodiester linkage"
  misc_feature 11: /note="The nucleotide in position 11 and the nucleotide in position 12 are linked through a phosphodiester linkage"
  misc_feature 12: /note="A is a 2'-fluoro-adenosine (fA)"
  misc_feature 12: /note="The nucleotide in position 12 and the nucleotide in position 11 are linked through a phosphodiester linkage"
  misc_feature 12: /note="The nucleotide in position 12 and the nucleotide in position 13 are linked through a phosphodiester linkage"
  misc_feature 13: /note="U is a 2'-O-Methyluridine (mU)"
  misc_feature 13: /note="The nucleotide in position 13 and the nucleotide in position 12 are linked through a phosphodiester linkage"
  misc_feature 13: /note="The nucleotide in position 13 and the nucleotide in position 14 are linked through a phosphodiester linkage"
  misc_feature 14: /note="G is a 2'-fluoro-guanosine (fG)"
  misc_feature 14: /note="The nucleotide in position 14 and the nucleotide in position 13 are linked through a phosphodiester linkage"
  misc_feature 14: /note="The nucleotide in position 14 and the nucleotide in position 15 are linked through a phosphodiester linkage"
  misc_feature 15: /note="G is a 2'-O-Methylguanosine (mG)"
  misc_feature 15: /note="The nucleotide in position 15 and the nucleotide in position 14 are linked through a phosphodiester linkage"
  misc_feature 15: /note="The nucleotide in position 15 and the nucleotide in position 16 are linked through a phosphodiester linkage"
  misc_feature 16: /note="U is a 2'-fluoro-uridine (fU)"
  misc_feature 16: /note="The nucleotide in position 16 and the nucleotide in position 15 are linked through a phosphodiester linkage"
  misc_feature 16: /note="The nucleotide in position 16 and the nucleotide in position 17 are linked through a phosphodiester linkage"
  misc_feature 17: /note="G is a 2'-O-Methylguanosine (mG)"
  misc_feature 17: /note="The nucleotide in position 17 and the nucleotide in position 16 are linked through a phosphodiester linkage"
  misc_feature 17: /note="The nucleotide in position 17 and the nucleotide in position 18 are linked through a phosphodiester linkage"
  misc_feature 18: /note="A is a 2'-fluoro-adenosine (fA)"
  misc_feature 18: /note="The nucleotide in position 18 and the nucleotide in position 17 are linked through a phosphodiester linkage"
  misc_feature 18: /note="The nucleotide in position 18 and the nucleotide in position 19 are linked through a phosphodiester linkage"
  misc_feature 19: /note="C is a 2'-O-Methylcytidine (mC)"
  misc_feature 19: /note="The nucleotide in position 19 and the nucleotide in position 18 are linked through a phosphodiester linkage"
  misc_feature 19: /note="The nucleotide in position 19 and the nucleotide in position 20 are linked through a phosphodiester linkage"
  misc_feature 20: /note="U is a 2'-fluoro-uridine (fU)"
  misc_feature 20: /note="The nucleotide in position 20 and the nucleotide in position 19 are linked through a phosphodiester linkage"
  misc_feature 20: /note="The nucleotide in position 20 and the nucleotide in position 21 are linked through a phosphorothioate linkage"
  misc_feature 21: /note="U is a 2'-O-Methyluridine (mU)"
  misc_feature 21: /note="The nucleotide in position 21 and the nucleotide in position 20 are linked through a phosphorothioate linkage"
  misc_feature 21: /note="The nucleotide in position 21 and the nucleotide in position 22 are linked through a phosphorothioate linkage"
  misc_feature 22: /note="U is a 2'-fluoro-uridine (fU)"
  misc_feature 22: /note="The nucleotide in position 22 and the nucleotide in position 21 are linked through a phosphorothioate linkage"
tttuuauuaauauggugacuuu

SEQ ID NO: 621 - RNA, 22 nt, Artificial Sequence
  Forward C027.003#01,#02,#03,#04,#05
  misc_feature 1: /note="T is a lgT3 nucleotide analog"
  misc_feature 1: /note="The nucleotide in position 1 and the nucleotide in position 2 are linked through a phosphodiester linkage"
  misc_feature 2: /note="T is a lgT3 nucleotide analog"
  misc_feature 2: /note="The nucleotide in position 2 and the nucleotide in position 1 are linked through a phosphodiester linkage"
  misc_feature 2: /note="The nucleotide in position 2 and the nucleotide in position 3 are linked through a phosphodiester linkage"
  misc_feature 3: /note="T is a lgT3 nucleotide analog"
  misc_feature 3: /note="The nucleotide in position 3 and the nucleotide in position 2 are linked through a phosphodiester linkage"
  misc_feature 3: /note="The nucleotide in position 3 and the nucleotide in position 4 are linked through a phosphodiester linkage"
  misc_feature 4: /note="U is a 2'-O-Methyluridine (mU)"
  misc_feature 4: /note="The nucleotide in position 4 and the nucleotide in position 3 are linked through a phosphodiester linkage"
  misc_feature 4: /note="The nucleotide in position 4 and the nucleotide in position 5 are linked through a phosphodiester linkage"
  misc_feature 5: /note="U is a 2'-O-Methyluridine (mU)"
  misc_feature 5: /note="The nucleotide in position 5 and the nucleotide in position 4 are linked through a phosphodiester linkage"
  misc_feature 5: /note="The nucleotide in position 5 and the nucleotide in position 6 are linked through a phosphodiester linkage"
  misc_feature 6: /note="A is a 2'-O-Methyladenosine (mA)"
  misc_feature 6: /note="The nucleotide in position 6 and the nucleotide in position 5 are linked through a phosphodiester linkage"
  misc_feature 6: /note="The nucleotide in position 6 and the nucleotide in position 7 are linked through a phosphodiester linkage"
  misc_feature 7: /note="U is a 2'-O-Methyluridine (mU)"
  misc_feature 7: /note="The nucleotide in position 7 and the nucleotide in position 6 are linked through a phosphodiester linkage"
  misc_feature 7: /note="The nucleotide in position7 and the nucleotide in position 8 are linked through a phosphodiester linkage"
  misc_feature 8: /note="U is a 2'-fluoro-uridine (fU)"
  misc_feature 8: /note="The nucleotide in position 8 and the nucleotide in position 7 are linked through a phosphodiester linkage"
  misc_feature 8: /note="The nucleotide in position 8 and the nucleotide in position 9 are linked through a phosphodiester linkage"
  misc_feature 9: /note="A is a 2'-O-Methyladenosine (mA)"
  misc_feature 9: /note="The nucleotide in position 9 and the nucleotide in position 8 are linked through a phosphodiester linkage"
  misc_feature 9: /note="The nucleotide in position 9 and the nucleotide in position 10 are linked through a phosphodiester linkage"
  misc_feature 10: /note="A is a 2'-fluoro-adenosine (fA)"
  misc_feature 10: /note="The nucleotide in position 10 and the nucleotide in position 9 are linked through a phosphodiester linkage"
  misc_feature 10: /note="The nucleotide in position 10 and the nucleotide in position 11 are linked through a phosphodiester linkage"
  misc_feature 11: /note="U is a 2'-fluoro-uridine (fU)"
  misc_feature 11: /note="The nucleotide in position 11 and the nucleotide in position 10 are linked through a phosphodiester linkage"
  misc_feature 11: /note="The nucleotide in position 11 and the nucleotide in position 12 are linked through a phosphodiester linkage"
  misc_feature 12: /note="A is a 2'-fluoro-adenosine (fA)"
  misc_feature 12: /note="The nucleotide in position 12 and the nucleotide in position 11 are linked through a phosphodiester linkage"
  misc_feature 12: /note="The nucleotide in position 12 and the nucleotide in position 13 are linked through a phosphodiester linkage"
  misc_feature 13: /note="U is a 2'-O-Methyluridine (mU)"
  misc_feature 13: /note="The nucleotide in position 13 and the nucleotide in position 12 are linked through a phosphodiester linkage"
  misc_feature 13: /note="The nucleotide in position 13 and the nucleotide in position 14 are linked through a phosphodiester linkage"
  misc_feature 14: /note="G is a 2'-fluoro-guanosine (fG)"
  misc_feature 14: /note="The nucleotide in position 14 and the nucleotide in position 13 are linked through a phosphodiester linkage"
  misc_feature 14: /note="The nucleotide in position 14 and the nucleotide in position 15 are linked through a phosphodiester linkage"
  misc_feature 15: /note="G is a 2'-O-Methylguanosine (mG)"
  misc_feature 15: /note="The nucleotide in position 15 and the nucleotide in position 14 are linked through a phosphodiester linkage"
  misc_feature 15: /note="The nucleotide in position 15 and the nucleotide in position 16 are linked through a phosphodiester linkage"
  misc_feature 16: /note="U is a 2'-O-Methyluridine (mU)"
  misc_feature 16: /note="The nucleotide in position 16 and the nucleotide in position 15 are linked through a phosphodiester linkage"
  misc_feature 16: /note="The nucleotide in position 16 and the nucleotide in position 17 are linked through a phosphodiester linkage"
  misc_feature 17: /note="G is a 2'-O-Methylguanosine (mG)"
  misc_feature 17: /note="The nucleotide in position 17 and the nucleotide in position 16 are linked through a phosphodiester linkage"
  misc_feature 17: /note="The nucleotide in position 17 and the nucleotide in position 18 are linked through a phosphodiester linkage"
  misc_feature 18: /note="A is a 2'-O-Methyladenosine (mA)"
  misc_feature 18: /note="The nucleotide in position 18 and the nucleotide in position 17 are linked through a phosphodiester linkage"
  misc_feature 18: /note="The nucleotide in position 18 and the nucleotide in position 19 are linked through a phosphodiester linkage"
  misc_feature 19: /note="C is a 2'-O-Methylcytidine (mC)"
  misc_feature 19: /note="The nucleotide in position 19 and the nucleotide in position 18 are linked through a phosphodiester linkage"
  misc_feature 19: /note="The nucleotide in position 19 and the nucleotide in position 20 are linked through a phosphodiester linkage"
  misc_feature 20: /note="U is a 2'-O-Methyluridine (mU)"
  misc_feature 20: /note="The nucleotide in position 20 and the nucleotide in position 19 are linked through a phosphodiester linkage"
  misc_feature 20: /note="The nucleotide in position 20 and the nucleotide in position 21 are linked through a phosphorothioate linkage"
  misc_feature 21: /note="U is a 2'-O-Methyluridine (mU)"
  misc_feature 21: /note="The nucleotide in position 21 and the nucleotide in position 20 are linked through a phosphorothioate linkage"
  misc_feature 21: /note="The nucleotide in position 21 and the nucleotide in position 22 are linked through a phosphorothioate linkage"
  misc_feature 22: /note="U is a 2'-fluoro-uridine (fU)"
  misc_feature 22: /note="The nucleotide in position 22 and the nucleotide in position 21 are linked through a phosphorothioate linkage"
tttuuauuaauauggugacuuu

SEQ ID NO: 622 - RNA, 22 nt, Artificial Sequence
  Forward C027.003#06,#07,#08,#09,#10
  misc_feature 1: /note="T is a lgT3 nucleotide analog"
  misc_feature 1: /note="The nucleotide in position 1 and the nucleotide in position 2 are linked through a phosphodiester linkage"
  misc_feature 2: /note="T is a lgT3 nucleotide analog"
  misc_feature 2: /note="The nucleotide in position 2 and the nucleotide in position 1 are linked through a phosphodiester linkage"
  misc_feature 2: /note="The nucleotide in position 2 and the nucleotide in position 3 are linked through a phosphodiester linkage"
  misc_feature 3: /note="T is a lgT3 nucleotide analog"
  misc_feature 3: /note="The nucleotide in position 3 and the nucleotide in position 2 are linked through a phosphodiester linkage"
  misc_feature 3: /note="The nucleotide in position 3 and the nucleotide in position 4 are linked through a phosphodiester linkage"
  misc_feature 4: /note="T is a LT4 nucleotide analog"
  misc_feature 4: /note="The nucleotide in position 4 and the nucleotide in position 3 are linked through a phosphodiester linkage"
  misc_feature 4: /note="The nucleotide in position 4 and the nucleotide in position 5 are linked through a phosphodiester linkage"
  misc_feature 5: /note="T is a LT4 nucleotide analog"
  misc_feature 5: /note="The nucleotide in position 5 and the nucleotide in position 4 are linked through a phosphodiester linkage"
  misc_feature 5: /note="The nucleotide in position 5 and the nucleotide in position 6 are linked through a phosphodiester linkage"
  misc_feature 6: /note="A is a 2'-O-Methyladenosine (mA)"
  misc_feature 6: /note="The nucleotide in position 6 and the nucleotide in position 5 are linked through a phosphodiester linkage"
  misc_feature 6: /note="The nucleotide in position 6 and the nucleotide in position 7 are linked through a phosphodiester linkage"
  misc_feature 7: /note="U is a 2'-O-Methyluridine (mU)"
  misc_feature 7: /note="The nucleotide in position 7 and the nucleotide in position 6 are linked through a phosphodiester linkage"
  misc_feature 7: /note="The nucleotide in position7 and the nucleotide in position 8 are linked through a phosphodiester linkage"
  misc_feature 8: /note="U is a 2'-fluoro-uridine (fU)"
  misc_feature 8: /note="The nucleotide in position 8 and the nucleotide in position 7 are linked through a phosphodiester linkage"
  misc_feature 8: /note="The nucleotide in position 8 and the nucleotide in position 9 are linked through a phosphodiester linkage"
  misc_feature 9: /note="A is a 2'-O-Methyladenosine (mA)"
  misc_feature 9: /note="The nucleotide in position 9 and the nucleotide in position 8 are linked through a phosphodiester linkage"
  misc_feature 9: /note="The nucleotide in position 9 and the nucleotide in position 10 are linked through a phosphodiester linkage"
  misc_feature 10: /note="A is a 2'-fluoro-adenosine (fA)"
  misc_feature 10: /note="The nucleotide in position 10 and the nucleotide in position 9 are linked through a phosphodiester linkage"
  misc_feature 10: /note="The nucleotide in position 10 and the nucleotide in position 11 are linked through a phosphodiester linkage"
  misc_feature 11: /note="U is a 2'-fluoro-uridine (fU)"
  misc_feature 11: /note="The nucleotide in position 11 and the nucleotide in position 10 are linked through a phosphodiester linkage"
  misc_feature 11: /note="The nucleotide in position 11 and the nucleotide in position 12 are linked through a phosphodiester linkage"
  misc_feature 12: /note="A is a 2'-fluoro-adenosine (fA)"
  misc_feature 12: /note="The nucleotide in position 12 and the nucleotide in position 11 are linked through a phosphodiester linkage"
  misc_feature 12: /note="The nucleotide in position 12 and the nucleotide in position 13 are linked through a phosphodiester linkage"
  misc_feature 13: /note="U is a 2'-O-Methyluridine (mU)"
  misc_feature 13: /note="The nucleotide in position 13 and the nucleotide in position 12 are linked through a phosphodiester linkage"
  misc_feature 13: /note="The nucleotide in position 13 and the nucleotide in position 14 are linked through a phosphodiester linkage"
  misc_feature 14: /note="G is a 2'-fluoro-guanosine (fG)"
  misc_feature 14: /note="The nucleotide in position 14 and the nucleotide in position 13 are linked through a phosphodiester linkage"
  misc_feature 14: /note="The nucleotide in position 14 and the nucleotide in position 15 are linked through a phosphodiester linkage"
  misc_feature 15: /note="G is a 2'-O-Methylguanosine (mG)"
  misc_feature 15: /note="The nucleotide in position 15 and the nucleotide in position 14 are linked through a phosphodiester linkage"
  misc_feature 15: /note="The nucleotide in position 15 and the nucleotide in position 16 are linked through a phosphodiester linkage"
  misc_feature 16: /note="U is a 2'-O-Methyluridine (mU)"
  misc_feature 16: /note="The nucleotide in position 16 and the nucleotide in position 15 are linked through a phosphodiester linkage"
  misc_feature 16: /note="The nucleotide in position 16 and the nucleotide in position 17 are linked through a phosphodiester linkage"
  misc_feature 17: /note="G is a 2'-O-Methylguanosine (mG)"
  misc_feature 17: /note="The nucleotide in position 17 and the nucleotide in position 16 are linked through a phosphodiester linkage"
  misc_feature 17: /note="The nucleotide in position 17 and the nucleotide in position 18 are linked through a phosphodiester linkage"
  misc_feature 18: /note="A is a 2'-O-Methyladenosine (mA)"
  misc_feature 18: /note="The nucleotide in position 18 and the nucleotide in position 17 are linked through a phosphodiester linkage"
  misc_feature 18: /note="The nucleotide in position 18 and the nucleotide in position 19 are linked through a phosphodiester linkage"
  misc_feature 19: /note="C is a 2'-O-Methylcytidine (mC)"
  misc_feature 19: /note="The nucleotide in position 19 and the nucleotide in position 18 are linked through a phosphodiester linkage"
  misc_feature 19: /note="The nucleotide in position 19 and the nucleotide in position 20 are linked through a phosphodiester linkage"
  misc_feature 20: /note="U is a 2'-O-Methyluridine (mU)"
  misc_feature 20: /note="The nucleotide in position 20 and the nucleotide in position 19 are linked through a phosphodiester linkage"
  misc_feature 20: /note="The nucleotide in position 20 and the nucleotide in position 21 are linked through a phosphorothioate linkage"
  misc_feature 21: /note="U is a 2'-O-Methyluridine (mU)"
  misc_feature 21: /note="The nucleotide in position 21 and the nucleotide in position 20 are linked through a phosphorothioate linkage"
  misc_feature 21: /note="The nucleotide in position 21 and the nucleotide in position 22 are linked through a phosphorothioate linkage"
  misc_feature 22: /note="U is a 2'-fluoro-uridine (fU)"
  misc_feature 22: /note="The nucleotide in position 22 and the nucleotide in position 21 are linked through a phosphorothioate linkage"
tttttauuaauauggugacuuu

SEQ ID NO: 623 - RNA, 22 nt, Artificial Sequence
  Forward C027.003#11,#12,#13,#14,#15,#16,#17,#18,#19
  misc_feature 1: /note="T is a lgT3 nucleotide analog"
  misc_feature 1: /note="The nucleotide in position 1 and the nucleotide in position 2 are linked through a phosphodiester linkage"
  misc_feature 2: /note="T is a lgT3 nucleotide analog"
  misc_feature 2: /note="The nucleotide in position 2 and the nucleotide in position 1 are linked through a phosphodiester linkage"
  misc_feature 2: /note="The nucleotide in position 2 and the nucleotide in position 3 are linked through a phosphodiester linkage"
  misc_feature 3: /note="T is a lgT3 nucleotide analog"
  misc_feature 3: /note="The nucleotide in position 3 and the nucleotide in position 2 are linked through a phosphodiester linkage"
  misc_feature 3: /note="The nucleotide in position 3 and the nucleotide in position 4 are linked through a phosphodiester linkage"
  misc_feature 4: /note="U is a 2'-O-Methyluridine (mU)"
  misc_feature 4: /note="The nucleotide in position 4 and the nucleotide in position 3 are linked through a phosphodiester linkage"
  misc_feature 4: /note="The nucleotide in position 4 and the nucleotide in position 5 are linked through a phosphodiester linkage"
  misc_feature 5: /note="U is a 2'-O-Methyluridine (mU)"
  misc_feature 5: /note="The nucleotide in position 5 and the nucleotide in position 4 are linked through a phosphodiester linkage"
  misc_feature 5: /note="The nucleotide in position 5 and the nucleotide in position 6 are linked through a phosphodiester linkage"
  misc_feature 6: /note="A is a 2'-O-Methyladenosine (mA)"
  misc_feature 6: /note="The nucleotide in position 6 and the nucleotide in position 5 are linked through a phosphodiester linkage"
  misc_feature 6: /note="The nucleotide in position 6 and the nucleotide in position 7 are linked through a phosphodiester linkage"
  misc_feature 7: /note="U is a 2'-O-Methyluridine (mU)"
  misc_feature 7: /note="The nucleotide in position 7 and the nucleotide in position 6 are linked through a phosphodiester linkage"
  misc_feature 7: /note="The nucleotide in position7 and the nucleotide in position 8 are linked through a phosphodiester linkage"
  misc_feature 8: /note="U is a 2'-fluoro-uridine (fU)"
  misc_feature 8: /note="The nucleotide in position 8 and the nucleotide in position 7 are linked through a phosphodiester linkage"
  misc_feature 8: /note="The nucleotide in position 8 and the nucleotide in position 9 are linked through a phosphodiester linkage"
  misc_feature 9: /note="A is a 2'-O-Methyladenosine (mA)"
  misc_feature 9: /note="The nucleotide in position 9 and the nucleotide in position 8 are linked through a phosphodiester linkage"
  misc_feature 9: /note="The nucleotide in position 9 and the nucleotide in position 10 are linked through a phosphodiester linkage"
  misc_feature 10: /note="A is a 2'-fluoro-adenosine (fA)"
  misc_feature 10: /note="The nucleotide in position 10 and the nucleotide in position 9 are linked through a phosphodiester linkage"
  misc_feature 10: /note="The nucleotide in position 10 and the nucleotide in position 11 are linked through a phosphodiester linkage"
  misc_feature 11: /note="U is a 2'-fluoro-uridine (fU)"
  misc_feature 11: /note="The nucleotide in position 11 and the nucleotide in position 10 are linked through a phosphodiester linkage"
  misc_feature 11: /note="The nucleotide in position 11 and the nucleotide in position 12 are linked through a phosphodiester linkage"
  misc_feature 12: /note="A is a 2'-fluoro-adenosine (fA)"
  misc_feature 12: /note="The nucleotide in position 12 and the nucleotide in position 11 are linked through a phosphodiester linkage"
  misc_feature 12: /note="The nucleotide in position 12 and the nucleotide in position 13 are linked through a phosphodiester linkage"
  misc_feature 13: /note="U is a 2'-O-Methyluridine (mU)"
  misc_feature 13: /note="The nucleotide in position 13 and the nucleotide in position 12 are linked through a phosphodiester linkage"
  misc_feature 13: /note="The nucleotide in position 13 and the nucleotide in position 14 are linked through a phosphodiester linkage"
  misc_feature 14: /note="G is a 2'-fluoro-guanosine (fG)"
  misc_feature 14: /note="The nucleotide in position 14 and the nucleotide in position 13 are linked through a phosphodiester linkage"
  misc_feature 14: /note="The nucleotide in position 14 and the nucleotide in position 15 are linked through a phosphodiester linkage"
  misc_feature 15: /note="G is a 2'-O-Methylguanosine (mG)"
  misc_feature 15: /note="The nucleotide in position 15 and the nucleotide in position 14 are linked through a phosphodiester linkage"
  misc_feature 15: /note="The nucleotide in position 15 and the nucleotide in position 16 are linked through a phosphodiester linkage"
  misc_feature 16: /note="U is a 2'-O-Methyluridine (mU)"
  misc_feature 16: /note="The nucleotide in position 16 and the nucleotide in position 15 are linked through a phosphodiester linkage"
  misc_feature 16: /note="The nucleotide in position 16 and the nucleotide in position 17 are linked through a phosphodiester linkage"
  misc_feature 17: /note="G is a 2'-O-Methylguanosine (mG)"
  misc_feature 17: /note="The nucleotide in position 17 and the nucleotide in position 16 are linked through a phosphodiester linkage"
  misc_feature 17: /note="The nucleotide in position 17 and the nucleotide in position 18 are linked through a phosphodiester linkage"
  misc_feature 18: /note="A is a 2'-O-Methyladenosine (mA)"
  misc_feature 18: /note="The nucleotide in position 18 and the nucleotide in position 17 are linked through a phosphodiester linkage"
  misc_feature 18: /note="The nucleotide in position 18 and the nucleotide in position 19 are linked through a phosphodiester linkage"
  misc_feature 19: /note="C is a 2'-O-Methylcytidine (mC)"
  misc_feature 19: /note="The nucleotide in position 19 and the nucleotide in position 18 are linked through a phosphodiester linkage"
  misc_feature 19: /note="The nucleotide in position 19 and the nucleotide in position 20 are linked through a phosphodiester linkage"
  misc_feature 20: /note="U is a 2'-O-Methyluridine (mU)"
  misc_feature 20: /note="The nucleotide in position 20 and the nucleotide in position 19 are linked through a phosphodiester linkage"
  misc_feature 20: /note="The nucleotide in position 20 and the nucleotide in position 21 are linked through a phosphodiester linkage"
  misc_feature 21: /note="T is a LT4 nucleotide analog"
  misc_feature 21: /note="The nucleotide in position 21 and the nucleotide in position 20 are linked through a phosphodiester linkage"
  misc_feature 21: /note="The nucleotide in position 21 and the nucleotide in position 22 are linked through a phosphodiester linkage"
  misc_feature 22: /note="T is a LT4 nucleotide analog"
  misc_feature 22: /note="The nucleotide in position 22 and the nucleotide in position 21 are linked through a phosphodiester linkage"
tttuuauuaauauggugacuuu

SEQ ID NO: 624 - RNA, 22 nt, Artificial Sequence
  Forward C027.003#20,#21,#22,#23,#24,#25,#26,#27,#28
  misc_feature 1: /note="T is a lgT3 nucleotide analog"
  misc_feature 1: /note="The nucleotide in position 1 and the nucleotide in position 2 are linked through a phosphorothioate linkage"
  misc_feature 2: /note="T is a lgT3 nucleotide analog"
  misc_feature 2: /note="The nucleotide in position 2 and the nucleotide in position 1 are linked through a phosphorothioate linkage"
  misc_feature 2: /note="The nucleotide in position 2 and the nucleotide in position 3 are linked through a phosphorothioate linkage"
  misc_feature 3: /note="T is a lgT3 nucleotide analog"
  misc_feature 3: /note="The nucleotide in position 3 and the nucleotide in position 2 are linked through a phosphodiester linkage"
  misc_feature 3: /note="The nucleotide in position 3 and the nucleotide in position 4 are linked through a phosphodiester linkage"
  misc_feature 4: /note="U is a 2'-O-Methyluridine (mU)"
  misc_feature 4: /note="The nucleotide in position 4 and the nucleotide in position 3 are linked through a phosphodiester linkage"
  misc_feature 4: /note="The nucleotide in position 4 and the nucleotide in position 5 are linked through a phosphodiester linkage"
  misc_feature 5: /note="U is a 2'-O-Methyluridine (mU)"
  misc_feature 5: /note="The nucleotide in position 5 and the nucleotide in position 4 are linked through a phosphodiester linkage"
  misc_feature 5: /note="The nucleotide in position 5 and the nucleotide in position 6 are linked through a phosphodiester linkage"
  misc_feature 6: /note="A is a 2'-O-Methyladenosine (mA)"
  misc_feature 6: /note="The nucleotide in position 6 and the nucleotide in position 5 are linked through a phosphodiester linkage"
  misc_feature 6: /note="The nucleotide in position 6 and the nucleotide in position 7 are linked through a phosphodiester linkage"
  misc_feature 7: /note="U is a 2'-O-Methyluridine (mU)"
  misc_feature 7: /note="The nucleotide in position 7 and the nucleotide in position 6 are linked through a phosphodiester linkage"
  misc_feature 7: /note="The nucleotide in position7 and the nucleotide in position 8 are linked through a phosphodiester linkage"
  misc_feature 8: /note="U is a 2'-fluoro-uridine (fU)"
  misc_feature 8: /note="The nucleotide in position 8 and the nucleotide in position 7 are linked through a phosphodiester linkage"
  misc_feature 8: /note="The nucleotide in position 8 and the nucleotide in position 9 are linked through a phosphodiester linkage"
  misc_feature 9: /note="A is a 2'-O-Methyladenosine (mA)"
  misc_feature 9: /note="The nucleotide in position 9 and the nucleotide in position 8 are linked through a phosphodiester linkage"
  misc_feature 9: /note="The nucleotide in position 9 and the nucleotide in position 10 are linked through a phosphodiester linkage"
  misc_feature 10: /note="A is a 2'-fluoro-adenosine (fA)"
  misc_feature 10: /note="The nucleotide in position 10 and the nucleotide in position 9 are linked through a phosphodiester linkage"
  misc_feature 10: /note="The nucleotide in position 10 and the nucleotide in position 11 are linked through a phosphodiester linkage"
  misc_feature 11: /note="U is a 2'-fluoro-uridine (fU)"
  misc_feature 11: /note="The nucleotide in position 11 and the nucleotide in position 10 are linked through a phosphodiester linkage"
  misc_feature 11: /note="The nucleotide in position 11 and the nucleotide in position 12 are linked through a phosphodiester linkage"
  misc_feature 12: /note="A is a 2'-fluoro-adenosine (fA)"
  misc_feature 12: /note="The nucleotide in position 12 and the nucleotide in position 11 are linked through a phosphodiester linkage"
  misc_feature 12: /note="The nucleotide in position 12 and the nucleotide in position 13 are linked through a phosphodiester linkage"
  misc_feature 13: /note="U is a 2'-O-Methyluridine (mU)"
  misc_feature 13: /note="The nucleotide in position 13 and the nucleotide in position 12 are linked through a phosphodiester linkage"
  misc_feature 13: /note="The nucleotide in position 13 and the nucleotide in position 14 are linked through a phosphodiester linkage"
  misc_feature 14: /note="G is a 2'-fluoro-guanosine (fG)"
  misc_feature 14: /note="The nucleotide in position 14 and the nucleotide in position 13 are linked through a phosphodiester linkage"
  misc_feature 14: /note="The nucleotide in position 14 and the nucleotide in position 15 are linked through a phosphodiester linkage"
  misc_feature 15: /note="G is a 2'-O-Methylguanosine (mG)"
  misc_feature 15: /note="The nucleotide in position 15 and the nucleotide in position 14 are linked through a phosphodiester linkage"
  misc_feature 15: /note="The nucleotide in position 15 and the nucleotide in position 16 are linked through a phosphodiester linkage"
  misc_feature 16: /note="U is a 2'-O-Methyluridine (mU)"
  misc_feature 16: /note="The nucleotide in position 16 and the nucleotide in position 15 are linked through a phosphodiester linkage"
  misc_feature 16: /note="The nucleotide in position 16 and the nucleotide in position 17 are linked through a phosphodiester linkage"
  misc_feature 17: /note="G is a 2'-O-Methylguanosine (mG)"
  misc_feature 17: /note="The nucleotide in position 17 and the nucleotide in position 16 are linked through a phosphodiester linkage"
  misc_feature 17: /note="The nucleotide in position 17 and the nucleotide in position 18 are linked through a phosphodiester linkage"
  misc_feature 18: /note="A is a 2'-O-Methyladenosine (mA)"
  misc_feature 18: /note="The nucleotide in position 18 and the nucleotide in position 17 are linked through a phosphodiester linkage"
  misc_feature 18: /note="The nucleotide in position 18 and the nucleotide in position 19 are linked through a phosphodiester linkage"
  misc_feature 19: /note="C is a 2'-O-Methylcytidine (mC)"
  misc_feature 19: /note="The nucleotide in position 19 and the nucleotide in position 18 are linked through a phosphodiester linkage"
  misc_feature 19: /note="The nucleotide in position 19 and the nucleotide in position 20 are linked through a phosphodiester linkage"
  misc_feature 20: /note="U is a 2'-O-Methyluridine (mU)"
  misc_feature 20: /note="The nucleotide in position 20 and the nucleotide in position 19 are linked through a phosphodiester linkage"
  misc_feature 20: /note="The nucleotide in position 20 and the nucleotide in position 21 are linked through a phosphorothioate linkage"
  misc_feature 21: /note="U is a 2'-O-Methyluridine (mU)"
  misc_feature 21: /note="The nucleotide in position 21 and the nucleotide in position 20 are linked through a phosphorothioate linkage"
  misc_feature 21: /note="The nucleotide in position 21 and the nucleotide in position 22 are linked through a phosphorothioate linkage"
  misc_feature 22: /note="U is a 2'-fluoro-uridine (fU)"
  misc_feature 22: /note="The nucleotide in position 22 and the nucleotide in position 21 are linked through a phosphorothioate linkage"
tttuuauuaauauggugacuuu

SEQ ID NO: 625 - RNA, 22 nt, Artificial Sequence
  Forward C027.003#29,#30,#31,#32,#33
  misc_feature 1: /note="T is a lgT3 nucleotide analog"
  misc_feature 1: /note="The nucleotide in position 1 and the nucleotide in position 2 are linked through a phosphodiester linkage"
  misc_feature 2: /note="T is a lgT3 nucleotide analog"
  misc_feature 2: /note="The nucleotide in position 2 and the nucleotide in position 1 are linked through a phosphodiester linkage"
  misc_feature 2: /note="The nucleotide in position 2 and the nucleotide in position 3 are linked through a phosphodiester linkage"
  misc_feature 3: /note="T is a lgT3 nucleotide analog"
  misc_feature 3: /note="The nucleotide in position 3 and the nucleotide in position 2 are linked through a phosphodiester linkage"
  misc_feature 3: /note="The nucleotide in position 3 and the nucleotide in position 4 are linked through a phosphodiester linkage"
  misc_feature 4: /note="T is a locked thymidine (lT)"
  misc_feature 4: /note="The nucleotide in position 4 and the nucleotide in position 3 are linked through a phosphodiester linkage"
  misc_feature 4: /note="The nucleotide in position 4 and the nucleotide in position 5 are linked through a phosphodiester linkage"
  misc_feature 5: /note="T is a locked thymidine (lT)"
  misc_feature 5: /note="The nucleotide in position 5 and the nucleotide in position 4 are linked through a phosphodiester linkage"
  misc_feature 5: /note="The nucleotide in position 5 and the nucleotide in position 6 are linked through a phosphodiester linkage"
  misc_feature 6: /note="A is a 2'-O-Methyladenosine (mA)"
  misc_feature 6: /note="The nucleotide in position 6 and the nucleotide in position 5 are linked through a phosphodiester linkage"
  misc_feature 6: /note="The nucleotide in position 6 and the nucleotide in position 7 are linked through a phosphodiester linkage"
  misc_feature 7: /note="U is a 2'-O-Methyluridine (mU)"
  misc_feature 7: /note="The nucleotide in position 7 and the nucleotide in position 6 are linked through a phosphodiester linkage"
  misc_feature 7: /note="The nucleotide in position7 and the nucleotide in position 8 are linked through a phosphodiester linkage"
  misc_feature 8: /note="U is a 2'-fluoro-uridine (fU)"
  misc_feature 8: /note="The nucleotide in position 8 and the nucleotide in position 7 are linked through a phosphodiester linkage"
  misc_feature 8: /note="The nucleotide in position 8 and the nucleotide in position 9 are linked through a phosphodiester linkage"
  misc_feature 9: /note="A is a 2'-O-Methyladenosine (mA)"
  misc_feature 9: /note="The nucleotide in position 9 and the nucleotide in position 8 are linked through a phosphodiester linkage"
  misc_feature 9: /note="The nucleotide in position 9 and the nucleotide in position 10 are linked through a phosphodiester linkage"
  misc_feature 10: /note="A is a 2'-fluoro-adenosine (fA)"
  misc_feature 10: /note="The nucleotide in position 10 and the nucleotide in position 9 are linked through a phosphodiester linkage"
  misc_feature 10: /note="The nucleotide in position 10 and the nucleotide in position 11 are linked through a phosphodiester linkage"
  misc_feature 11: /note="U is a 2'-fluoro-uridine (fU)"
  misc_feature 11: /note="The nucleotide in position 11 and the nucleotide in position 10 are linked through a phosphodiester linkage"
  misc_feature 11: /note="The nucleotide in position 11 and the nucleotide in position 12 are linked through a phosphodiester linkage"
  misc_feature 12: /note="A is a 2'-fluoro-adenosine (fA)"
  misc_feature 12: /note="The nucleotide in position 12 and the nucleotide in position 11 are linked through a phosphodiester linkage"
  misc_feature 12: /note="The nucleotide in position 12 and the nucleotide in position 13 are linked through a phosphodiester linkage"
  misc_feature 13: /note="U is a 2'-O-Methyluridine (mU)"
  misc_feature 13: /note="The nucleotide in position 13 and the nucleotide in position 12 are linked through a phosphodiester linkage"
  misc_feature 13: /note="The nucleotide in position 13 and the nucleotide in position 14 are linked through a phosphodiester linkage"
  misc_feature 14: /note="G is a 2'-fluoro-guanosine (fG)"
  misc_feature 14: /note="The nucleotide in position 14 and the nucleotide in position 13 are linked through a phosphodiester linkage"
  misc_feature 14: /note="The nucleotide in position 14 and the nucleotide in position 15 are linked through a phosphodiester linkage"
  misc_feature 15: /note="G is a 2'-O-Methylguanosine (mG)"
  misc_feature 15: /note="The nucleotide in position 15 and the nucleotide in position 14 are linked through a phosphodiester linkage"
  misc_feature 15: /note="The nucleotide in position 15 and the nucleotide in position 16 are linked through a phosphodiester linkage"
  misc_feature 16: /note="U is a 2'-O-Methyluridine (mU)"
  misc_feature 16: /note="The nucleotide in position 16 and the nucleotide in position 15 are linked through a phosphodiester linkage"
  misc_feature 16: /note="The nucleotide in position 16 and the nucleotide in position 17 are linked through a phosphodiester linkage"
  misc_feature 17: /note="G is a 2'-O-Methylguanosine (mG)"
  misc_feature 17: /note="The nucleotide in position 17 and the nucleotide in position 16 are linked through a phosphodiester linkage"
  misc_feature 17: /note="The nucleotide in position 17 and the nucleotide in position 18 are linked through a phosphodiester linkage"
  misc_feature 18: /note="A is a 2'-O-Methyladenosine (mA)"
  misc_feature 18: /note="The nucleotide in position 18 and the nucleotide in position 17 are linked through a phosphodiester linkage"
  misc_feature 18: /note="The nucleotide in position 18 and the nucleotide in position 19 are linked through a phosphodiester linkage"
  misc_feature 19: /note="C is a 2'-O-Methylcytidine (mC)"
  misc_feature 19: /note="The nucleotide in position 19 and the nucleotide in position 18 are linked through a phosphodiester linkage"
  misc_feature 19: /note="The nucleotide in position 19 and the nucleotide in position 20 are linked through a phosphodiester linkage"
  misc_feature 20: /note="U is a 2'-O-Methyluridine (mU)"
  misc_feature 20: /note="The nucleotide in position 20 and the nucleotide in position 19 are linked through a phosphodiester linkage"
  misc_feature 20: /note="The nucleotide in position 20 and the nucleotide in position 21 are linked through a phosphodiester linkage"
  misc_feature 21: /note="T is a LT4 nucleotide analog"
  misc_feature 21: /note="The nucleotide in position 21 and the nucleotide in position 20 are linked through a phosphodiester linkage"
  misc_feature 21: /note="The nucleotide in position 21 and the nucleotide in position 22 are linked through a phosphodiester linkage"
  misc_feature 22: /note="T is a LT4 nucleotide analog"
  misc_feature 22: /note="The nucleotide in position 22 and the nucleotide in position 21 are linked through a phosphodiester linkage"
tttttauuaauauggugacuuu

SEQ ID NO: 626 - RNA, 22 nt, Artificial Sequence
  Forward C027.003#34,#35,#36,#37,#38
  misc_feature 1: /note="T is a lgT3 nucleotide analog"
  misc_feature 1: /note="The nucleotide in position 1 and the nucleotide in position 2 are linked through a phosphorothioate linkage"
  misc_feature 2: /note="T is a lgT3 nucleotide analog"
  misc_feature 2: /note="The nucleotide in position 2 and the nucleotide in position 1 are linked through a phosphorothioate linkage"
  misc_feature 2: /note="The nucleotide in position 2 and the nucleotide in position 3 are linked through a phosphorothioate linkage"
  misc_feature 3: /note="T is a lgT3 nucleotide analog"
  misc_feature 3: /note="The nucleotide in position 3 and the nucleotide in position 2 are linked through a phosphodiester linkage"
  misc_feature 3: /note="The nucleotide in position 3 and the nucleotide in position 4 are linked through a phosphodiester linkage"
  misc_feature 4: /note="T is a locked thymidine (lT)"
  misc_feature 4: /note="The nucleotide in position 4 and the nucleotide in position 3 are linked through a phosphodiester linkage"
  misc_feature 4: /note="The nucleotide in position 4 and the nucleotide in position 5 are linked through a phosphodiester linkage"
  misc_feature 5: /note="T is a locked thymidine (lT)"
  misc_feature 5: /note="The nucleotide in position 5 and the nucleotide in position 4 are linked through a phosphodiester linkage"
  misc_feature 5: /note="The nucleotide in position 5 and the nucleotide in position 6 are linked through a phosphodiester linkage"
  misc_feature 6: /note="A is a 2'-O-Methyladenosine (mA)"
  misc_feature 6: /note="The nucleotide in position 6 and the nucleotide in position 5 are linked through a phosphodiester linkage"
  misc_feature 6: /note="The nucleotide in position 6 and the nucleotide in position 7 are linked through a phosphodiester linkage"
  misc_feature 7: /note="U is a 2'-O-Methyluridine (mU)"
  misc_feature 7: /note="The nucleotide in position 7 and the nucleotide in position 6 are linked through a phosphodiester linkage"
  misc_feature 7: /note="The nucleotide in position7 and the nucleotide in position 8 are linked through a phosphodiester linkage"
  misc_feature 8: /note="U is a 2'-fluoro-uridine (fU)"
  misc_feature 8: /note="The nucleotide in position 8 and the nucleotide in position 7 are linked through a phosphodiester linkage"
  misc_feature 8: /note="The nucleotide in position 8 and the nucleotide in position 9 are linked through a phosphodiester linkage"
  misc_feature 9: /note="A is a 2'-O-Methyladenosine (mA)"
  misc_feature 9: /note="The nucleotide in position 9 and the nucleotide in position 8 are linked through a phosphodiester linkage"
  misc_feature 9: /note="The nucleotide in position 9 and the nucleotide in position 10 are linked through a phosphodiester linkage"
  misc_feature 10: /note="A is a 2'-fluoro-adenosine (fA)"
  misc_feature 10: /note="The nucleotide in position 10 and the nucleotide in position 9 are linked through a phosphodiester linkage"
  misc_feature 10: /note="The nucleotide in position 10 and the nucleotide in position 11 are linked through a phosphodiester linkage"
  misc_feature 11: /note="U is a 2'-fluoro-uridine (fU)"
  misc_feature 11: /note="The nucleotide in position 11 and the nucleotide in position 10 are linked through a phosphodiester linkage"
  misc_feature 11: /note="The nucleotide in position 11 and the nucleotide in position 12 are linked through a phosphodiester linkage"
  misc_feature 12: /note="A is a 2'-fluoro-adenosine (fA)"
  misc_feature 12: /note="The nucleotide in position 12 and the nucleotide in position 11 are linked through a phosphodiester linkage"
  misc_feature 12: /note="The nucleotide in position 12 and the nucleotide in position 13 are linked through a phosphodiester linkage"
  misc_feature 13: /note="U is a 2'-O-Methyluridine (mU)"
  misc_feature 13: /note="The nucleotide in position 13 and the nucleotide in position 12 are linked through a phosphodiester linkage"
  misc_feature 13: /note="The nucleotide in position 13 and the nucleotide in position 14 are linked through a phosphodiester linkage"
  misc_feature 14: /note="G is a 2'-fluoro-guanosine (fG)"
  misc_feature 14: /note="The nucleotide in position 14 and the nucleotide in position 13 are linked through a phosphodiester linkage"
  misc_feature 14: /note="The nucleotide in position 14 and the nucleotide in position 15 are linked through a phosphodiester linkage"
  misc_feature 15: /note="G is a 2'-O-Methylguanosine (mG)"
  misc_feature 15: /note="The nucleotide in position 15 and the nucleotide in position 14 are linked through a phosphodiester linkage"
  misc_feature 15: /note="The nucleotide in position 15 and the nucleotide in position 16 are linked through a phosphodiester linkage"
  misc_feature 16: /note="U is a 2'-O-Methyluridine (mU)"
  misc_feature 16: /note="The nucleotide in position 16 and the nucleotide in position 15 are linked through a phosphodiester linkage"
  misc_feature 16: /note="The nucleotide in position 16 and the nucleotide in position 17 are linked through a phosphodiester linkage"
  misc_feature 17: /note="G is a 2'-O-Methylguanosine (mG)"
  misc_feature 17: /note="The nucleotide in position 17 and the nucleotide in position 16 are linked through a phosphodiester linkage"
  misc_feature 17: /note="The nucleotide in position 17 and the nucleotide in position 18 are linked through a phosphodiester linkage"
  misc_feature 18: /note="A is a 2'-O-Methyladenosine (mA)"
  misc_feature 18: /note="The nucleotide in position 18 and the nucleotide in position 17 are linked through a phosphodiester linkage"
  misc_feature 18: /note="The nucleotide in position 18 and the nucleotide in position 19 are linked through a phosphodiester linkage"
  misc_feature 19: /note="C is a 2'-O-Methylcytidine (mC)"
  misc_feature 19: /note="The nucleotide in position 19 and the nucleotide in position 18 are linked through a phosphodiester linkage"
  misc_feature 19: /note="The nucleotide in position 19 and the nucleotide in position 20 are linked through a phosphodiester linkage"
  misc_feature 20: /note="U is a 2'-O-Methyluridine (mU)"
  misc_feature 20: /note="The nucleotide in position 20 and the nucleotide in position 19 are linked through a phosphodiester linkage"
  misc_feature 20: /note="The nucleotide in position 20 and the nucleotide in position 21 are linked through a phosphorothioate linkage"
  misc_feature 21: /note="T is a LT4 nucleotide analog"
  misc_feature 21: /note="The nucleotide in position 21 and the nucleotide in position 20 are linked through a phosphorothioate linkage"
  misc_feature 21: /note="The nucleotide in position 21 and the nucleotide in position 22 are linked through a phosphorothioate linkage"
  misc_feature 22: /note="T is a LT4 nucleotide analog"
  misc_feature 22: /note="The nucleotide in position 22 and the nucleotide in position 21 are linked through a phosphorothioate linkage"
tttttauuaauauggugacuuu

SEQ ID NO: 627 - RNA, 24 nt, Artificial Sequence
  Forward C027.003#39,#40,#41,#42,#43,#44,#45,#46,#47
  misc_feature 1: /note="T is a lgT3 nucleotide analog"
  misc_feature 1: /note="The nucleotide in position 1 and the nucleotide in position 2 are linked through a phosphodiester linkage"
  misc_feature 2: /note="T is a lgT3 nucleotide analog"
  misc_feature 2: /note="The nucleotide in position 2 and the nucleotide in position 1 are linked through a phosphodiester linkage"
  misc_feature 2: /note="The nucleotide in position 2 and the nucleotide in position 3 are linked through a phosphodiester linkage"
  misc_feature 3: /note="T is a lgT3 nucleotide analog"
  misc_feature 3: /note="The nucleotide in position 3 and the nucleotide in position 2 are linked through a phosphodiester linkage"
  misc_feature 3: /note="The nucleotide in position 3 and the nucleotide in position 4 are linked through a phosphodiester linkage"
  misc_feature 4: /note="U is a 2'-O-Methyluridine (mU)"
  misc_feature 4: /note="The nucleotide in position 4 and the nucleotide in position 3 are linked through a phosphodiester linkage"
  misc_feature 4: /note="The nucleotide in position 4 and the nucleotide in position 5 are linked through a phosphodiester linkage"
  misc_feature 4: /note="U is a 2'-O-Methyluridine (mU)"
  misc_feature 5: /note="U is a 2'-O-Methyluridine (mU)"
  misc_feature 5: /note="The nucleotide in position 5 and the nucleotide in position 4 are linked through a phosphodiester linkage"
  misc_feature 5: /note="The nucleotide in position 5 and the nucleotide in position 6 are linked through a phosphodiester linkage"
  misc_feature 6: /note="A is a 2'-O-Methyladenosine (mA)"
  misc_feature 6: /note="The nucleotide in position 6 and the nucleotide in position 5 are linked through a phosphodiester linkage"
  misc_feature 6: /note="The nucleotide in position 6 and the nucleotide in position 7 are linked through a phosphodiester linkage"
  misc_feature 7: /note="U is a 2'-O-Methyluridine (mU)"
  misc_feature 7: /note="The nucleotide in position 7 and the nucleotide in position 6 are linked through a phosphodiester linkage"
  misc_feature 7: /note="The nucleotide in position7 and the nucleotide in position 8 are linked through a phosphodiester linkage"
  misc_feature 8: /note="U is a 2'-fluoro-uridine (fU)"
  misc_feature 8: /note="The nucleotide in position 8 and the nucleotide in position 7 are linked through a phosphodiester linkage"
  misc_feature 8: /note="The nucleotide in position 8 and the nucleotide in position 9 are linked through a phosphodiester linkage"
  misc_feature 9: /note="A is a 2'-O-Methyladenosine (mA)"
  misc_feature 9: /note="The nucleotide in position 9 and the nucleotide in position 8 are linked through a phosphodiester linkage"
  misc_feature 9: /note="The nucleotide in position 9 and the nucleotide in position 10 are linked through a phosphodiester linkage"
  misc_feature 10: /note="A is a 2'-fluoro-adenosine (fA)"
  misc_feature 10: /note="The nucleotide in position 10 and the nucleotide in position 9 are linked through a phosphodiester linkage"
  misc_feature 10: /note="The nucleotide in position 10 and the nucleotide in position 11 are linked through a phosphodiester linkage"
  misc_feature 11: /note="U is a 2'-fluoro-uridine (fU)"
  misc_feature 11: /note="The nucleotide in position 11 and the nucleotide in position 10 are linked through a phosphodiester linkage"
  misc_feature 11: /note="The nucleotide in position 11 and the nucleotide in position 12 are linked through a phosphodiester linkage"
  misc_feature 12: /note="A is a 2'-fluoro-adenosine (fA)"
  misc_feature 12: /note="The nucleotide in position 12 and the nucleotide in position 11 are linked through a phosphodiester linkage"
  misc_feature 12: /note="The nucleotide in position 12 and the nucleotide in position 13 are linked through a phosphodiester linkage"
  misc_feature 13: /note="U is a 2'-O-Methyluridine (mU)"
  misc_feature 13: /note="The nucleotide in position 13 and the nucleotide in position 12 are linked through a phosphodiester linkage"
  misc_feature 13: /note="The nucleotide in position 13 and the nucleotide in position 14 are linked through a phosphodiester linkage"
  misc_feature 14: /note="G is a 2'-fluoro-guanosine (fG)"
  misc_feature 14: /note="The nucleotide in position 14 and the nucleotide in position 13 are linked through a phosphodiester linkage"
  misc_feature 14: /note="The nucleotide in position 14 and the nucleotide in position 15 are linked through a phosphodiester linkage"
  misc_feature 15: /note="G is a 2'-O-Methylguanosine (mG)"
  misc_feature 15: /note="The nucleotide in position 15 and the nucleotide in position 14 are linked through a phosphodiester linkage"
  misc_feature 15: /note="The nucleotide in position 15 and the nucleotide in position 16 are linked through a phosphodiester linkage"
  misc_feature 16: /note="U is a 2'-O-Methyluridine (mU)"
  misc_feature 16: /note="The nucleotide in position 16 and the nucleotide in position 15 are linked through a phosphodiester linkage"
  misc_feature 16: /note="The nucleotide in position 16 and the nucleotide in position 17 are linked through a phosphodiester linkage"
  misc_feature 17: /note="G is a 2'-O-Methylguanosine (mG)"
  misc_feature 17: /note="The nucleotide in position 17 and the nucleotide in position 16 are linked through a phosphodiester linkage"
  misc_feature 17: /note="The nucleotide in position 17 and the nucleotide in position 18 are linked through a phosphodiester linkage"
  misc_feature 18: /note="A is a 2'-O-Methyladenosine (mA)"
  misc_feature 18: /note="The nucleotide in position 18 and the nucleotide in position 17 are linked through a phosphodiester linkage"
  misc_feature 18: /note="The nucleotide in position 18 and the nucleotide in position 19 are linked through a phosphodiester linkage"
  misc_feature 19: /note="C is a 2'-O-Methylcytidine (mC)"
  misc_feature 19: /note="The nucleotide in position 19 and the nucleotide in position 18 are linked through a phosphodiester linkage"
  misc_feature 19: /note="The nucleotide in position 19 and the nucleotide in position 20 are linked through a phosphodiester linkage"
  misc_feature 20: /note="U is a 2'-O-Methyluridine (mU)"
  misc_feature 20: /note="The nucleotide in position 20 and the nucleotide in position 19 are linked through a phosphodiester linkage"
  misc_feature 20: /note="The nucleotide in position 20 and the nucleotide in position 21 are linked through a phosphodiester linkage"
  misc_feature 21: /note="U is a 2'-O-Methyluridine (mU)"
  misc_feature 21: /note="The nucleotide in position 21 and the nucleotide in position 20 are linked through a phosphodiester linkage"
  misc_feature 21: /note="The nucleotide in position 21 and the nucleotide in position 22 are linked through a phosphodiester linkage"
  misc_feature 22: /note="U is a 2'-O-Methyluridine (mU)"
  misc_feature 22: /note="The nucleotide in position 22 and the nucleotide in position 21 are linked through a phosphodiester linkage"
  misc_feature 22: /note="The nucleotide in position 22 and the nucleotide in position 23 are linked through a phosphodiester linkage"
  misc_feature 23: /note="T is a LT4 nucleotide analog"
  misc_feature 23: /note="The nucleotide in position 23 and the nucleotide in position 22 are linked through a phosphodiester linkage"
  misc_feature 23: /note="The nucleotide in position 23 and the nucleotide in position 24 are linked through a phosphodiester linkage"
  misc_feature 24: /note="The nucleotide in position 24 and the nucleotide in position 23 are linked through a phosphodiester linkage"
  misc_feature 24: /note="T is a LT4 nucleotide analog"
tttuuauuaauauggugacuuutt

SEQ ID NO: 628 - RNA, 24 nt, Artificial Sequence
  Forward C027.003#48,#49,#50,#51,#52,#53,#54,#55,#56
  misc_feature 1: /note="T is a lgT3 nucleotide analog"
  misc_feature 1: /note="The nucleotide in position 1 and the nucleotide in position 2 are linked through a phosphorothioate linkage"
  misc_feature 2: /note="T is a lgT3 nucleotide analog"
  misc_feature 2: /note="The nucleotide in position 2 and the nucleotide in position 1 are linked through a phosphorothioate linkage"
  misc_feature 2: /note="The nucleotide in position 2 and the nucleotide in position 3 are linked through a phosphorothioate linkage"
  misc_feature 3: /note="T is a lgT3 nucleotide analog"
  misc_feature 3: /note="The nucleotide in position 3 and the nucleotide in position 2 are linked through a phosphodiester linkage"
  misc_feature 3: /note="The nucleotide in position 3 and the nucleotide in position 4 are linked through a phosphodiester linkage"
  misc_feature 4: /note="U is a 2'-O-Methyluridine (mU)"
  misc_feature 4: /note="The nucleotide in position 4 and the nucleotide in position 3 are linked through a phosphodiester linkage"
  misc_feature 4: /note="The nucleotide in position 4 and the nucleotide in position 5 are linked through a phosphodiester linkage"
  misc_feature 4: /note="U is a 2'-O-Methyluridine (mU)"
  misc_feature 5: /note="U is a 2'-O-Methyluridine (mU)"
  misc_feature 5: /note="The nucleotide in position 5 and the nucleotide in position 4 are linked through a phosphodiester linkage"
  misc_feature 5: /note="The nucleotide in position 5 and the nucleotide in position 6 are linked through a phosphodiester linkage"
  misc_feature 6: /note="A is a 2'-O-Methyladenosine (mA)"
  misc_feature 6: /note="The nucleotide in position 6 and the nucleotide in position 5 are linked through a phosphodiester linkage"
  misc_feature 6: /note="The nucleotide in position 6 and the nucleotide in position 7 are linked through a phosphodiester linkage"
  misc_feature 7: /note="U is a 2'-O-Methyluridine (mU)"
  misc_feature 7: /note="The nucleotide in position 7 and the nucleotide in position 6 are linked through a phosphodiester linkage"
  misc_feature 7: /note="The nucleotide in position7 and the nucleotide in position 8 are linked through a phosphodiester linkage"
  misc_feature 8: /note="U is a 2'-fluoro-uridine (fU)"
  misc_feature 8: /note="The nucleotide in position 8 and the nucleotide in position 7 are linked through a phosphodiester linkage"
  misc_feature 8: /note="The nucleotide in position 8 and the nucleotide in position 9 are linked through a phosphodiester linkage"
  misc_feature 9: /note="A is a 2'-O-Methyladenosine (mA)"
  misc_feature 9: /note="The nucleotide in position 9 and the nucleotide in position 8 are linked through a phosphodiester linkage"
  misc_feature 9: /note="The nucleotide in position 9 and the nucleotide in position 10 are linked through a phosphodiester linkage"
  misc_feature 10: /note="A is a 2'-fluoro-adenosine (fA)"
  misc_feature 10: /note="The nucleotide in position 10 and the nucleotide in position 9 are linked through a phosphodiester linkage"
  misc_feature 10: /note="The nucleotide in position 10 and the nucleotide in position 11 are linked through a phosphodiester linkage"
  misc_feature 11: /note="U is a 2'-fluoro-uridine (fU)"
  misc_feature 11: /note="The nucleotide in position 11 and the nucleotide in position 10 are linked through a phosphodiester linkage"
  misc_feature 11: /note="The nucleotide in position 11 and the nucleotide in position 12 are linked through a phosphodiester linkage"
  misc_feature 12: /note="A is a 2'-fluoro-adenosine (fA)"
  misc_feature 12: /note="The nucleotide in position 12 and the nucleotide in position 11 are linked through a phosphodiester linkage"
  misc_feature 12: /note="The nucleotide in position 12 and the nucleotide in position 13 are linked through a phosphodiester linkage"
  misc_feature 13: /note="U is a 2'-O-Methyluridine (mU)"
  misc_feature 13: /note="The nucleotide in position 13 and the nucleotide in position 12 are linked through a phosphodiester linkage"
  misc_feature 13: /note="The nucleotide in position 13 and the nucleotide in position 14 are linked through a phosphodiester linkage"
  misc_feature 14: /note="G is a 2'-fluoro-guanosine (fG)"
  misc_feature 14: /note="The nucleotide in position 14 and the nucleotide in position 13 are linked through a phosphodiester linkage"
  misc_feature 14: /note="The nucleotide in position 14 and the nucleotide in position 15 are linked through a phosphodiester linkage"
  misc_feature 15: /note="G is a 2'-O-Methylguanosine (mG)"
  misc_feature 15: /note="The nucleotide in position 15 and the nucleotide in position 14 are linked through a phosphodiester linkage"
  misc_feature 15: /note="The nucleotide in position 15 and the nucleotide in position 16 are linked through a phosphodiester linkage"
  misc_feature 16: /note="U is a 2'-O-Methyluridine (mU)"
  misc_feature 16: /note="The nucleotide in position 16 and the nucleotide in position 15 are linked through a phosphodiester linkage"
  misc_feature 16: /note="The nucleotide in position 16 and the nucleotide in position 17 are linked through a phosphodiester linkage"
  misc_feature 17: /note="G is a 2'-O-Methylguanosine (mG)"
  misc_feature 17: /note="The nucleotide in position 17 and the nucleotide in position 16 are linked through a phosphodiester linkage"
  misc_feature 17: /note="The nucleotide in position 17 and the nucleotide in position 18 are linked through a phosphodiester linkage"
  misc_feature 18: /note="A is a 2'-O-Methyladenosine (mA)"
  misc_feature 18: /note="The nucleotide in position 18 and the nucleotide in position 17 are linked through a phosphodiester linkage"
  misc_feature 18: /note="The nucleotide in position 18 and the nucleotide in position 19 are linked through a phosphodiester linkage"
  misc_feature 19: /note="C is a 2'-O-Methylcytidine (mC)"
  misc_feature 19: /note="The nucleotide in position 19 and the nucleotide in position 18 are linked through a phosphodiester linkage"
  misc_feature 19: /note="The nucleotide in position 19 and the nucleotide in position 20 are linked through a phosphodiester linkage"
  misc_feature 20: /note="U is a 2'-O-Methyluridine (mU)"
  misc_feature 20: /note="The nucleotide in position 20 and the nucleotide in position 19 are linked through a phosphodiester linkage"
  misc_feature 20: /note="The nucleotide in position 20 and the nucleotide in position 21 are linked through a phosphodiester linkage"
  misc_feature 21: /note="U is a 2'-O-Methyluridine (mU)"
  misc_feature 21: /note="The nucleotide in position 21 and the nucleotide in position 20 are linked through a phosphodiester linkage"
  misc_feature 21: /note="The nucleotide in position 21 and the nucleotide in position 22 are linked through a phosphodiester linkage"
  misc_feature 22: /note="U is a 2'-O-Methyluridine (mU)"
  misc_feature 22: /note="The nucleotide in position 22 and the nucleotide in position 21 are linked through a phosphorothioate linkage"
  misc_feature 22: /note="The nucleotide in position 22 and the nucleotide in position 23 are linked through a phosphorothioate linkage"
  misc_feature 23: /note="T is a LT4 nucleotide analog"
  misc_feature 23: /note="The nucleotide in position 23 and the nucleotide in position 22 are linked through a phosphorothioate linkage"
  misc_feature 23: /note="The nucleotide in position 23 and the nucleotide in position 24 are linked through a phosphorothioate linkage"
  misc_feature 24: /note="The nucleotide in position 24 and the nucleotide in position 23 are linked through a phosphorothioate linkage"
  misc_feature 24: /note="T is a LT4 nucleotide analog"
tttuuauuaauauggugacuuutt

SEQ ID NO: 629 - RNA, 24 nt, Artificial Sequence
  Forward C027.003#57,#58,#59,#60,#61
  misc_feature 1: /note="T is a lgT3 nucleotide analog"
  misc_feature 1: /note="The nucleotide in position 1 and the nucleotide in position 2 are linked through a phosphodiester linkage"
  misc_feature 2: /note="T is a lgT3 nucleotide analog"
  misc_feature 2: /note="The nucleotide in position 2 and the nucleotide in position 1 are linked through a phosphodiester linkage"
  misc_feature 2: /note="The nucleotide in position 2 and the nucleotide in position 3 are linked through a phosphodiester linkage"
  misc_feature 3: /note="T is a lgT3 nucleotide analog"
  misc_feature 3: /note="The nucleotide in position 3 and the nucleotide in position 2 are linked through a phosphodiester linkage"
  misc_feature 3: /note="The nucleotide in position 3 and the nucleotide in position 4 are linked through a phosphodiester linkage"
  misc_feature 4: /note="T is a locked thymidine (lT)"
  misc_feature 4: /note="The nucleotide in position 4 and the nucleotide in position 3 are linked through a phosphodiester linkage"
  misc_feature 4: /note="The nucleotide in position 4 and the nucleotide in position 5 are linked through a phosphodiester linkage"
  misc_feature 4: /note="U is a 2'-O-Methyluridine (mU)"
  misc_feature 5: /note="T is a locked thymidine (lT)"
  misc_feature 5: /note="The nucleotide in position 5 and the nucleotide in position 4 are linked through a phosphodiester linkage"
  misc_feature 5: /note="The nucleotide in position 5 and the nucleotide in position 6 are linked through a phosphodiester linkage"
  misc_feature 6: /note="A is a 2'-O-Methyladenosine (mA)"
  misc_feature 6: /note="The nucleotide in position 6 and the nucleotide in position 5 are linked through a phosphodiester linkage"
  misc_feature 6: /note="The nucleotide in position 6 and the nucleotide in position 7 are linked through a phosphodiester linkage"
  misc_feature 7: /note="U is a 2'-O-Methyluridine (mU)"
  misc_feature 7: /note="The nucleotide in position 7 and the nucleotide in position 6 are linked through a phosphodiester linkage"
  misc_feature 7: /note="The nucleotide in position7 and the nucleotide in position 8 are linked through a phosphodiester linkage"
  misc_feature 8: /note="U is a 2'-fluoro-uridine (fU)"
  misc_feature 8: /note="The nucleotide in position 8 and the nucleotide in position 7 are linked through a phosphodiester linkage"
  misc_feature 8: /note="The nucleotide in position 8 and the nucleotide in position 9 are linked through a phosphodiester linkage"
  misc_feature 9: /note="A is a 2'-O-Methyladenosine (mA)"
  misc_feature 9: /note="The nucleotide in position 9 and the nucleotide in position 8 are linked through a phosphodiester linkage"
  misc_feature 9: /note="The nucleotide in position 9 and the nucleotide in position 10 are linked through a phosphodiester linkage"
  misc_feature 10: /note="A is a 2'-fluoro-adenosine (fA)"
  misc_feature 10: /note="The nucleotide in position 10 and the nucleotide in position 9 are linked through a phosphodiester linkage"
  misc_feature 10: /note="The nucleotide in position 10 and the nucleotide in position 11 are linked through a phosphodiester linkage"
  misc_feature 11: /note="U is a 2'-fluoro-uridine (fU)"
  misc_feature 11: /note="The nucleotide in position 11 and the nucleotide in position 10 are linked through a phosphodiester linkage"
  misc_feature 11: /note="The nucleotide in position 11 and the nucleotide in position 12 are linked through a phosphodiester linkage"
  misc_feature 12: /note="A is a 2'-fluoro-adenosine (fA)"
  misc_feature 12: /note="The nucleotide in position 12 and the nucleotide in position 11 are linked through a phosphodiester linkage"
  misc_feature 12: /note="The nucleotide in position 12 and the nucleotide in position 13 are linked through a phosphodiester linkage"
  misc_feature 13: /note="U is a 2'-O-Methyluridine (mU)"
  misc_feature 13: /note="The nucleotide in position 13 and the nucleotide in position 12 are linked through a phosphodiester linkage"
  misc_feature 13: /note="The nucleotide in position 13 and the nucleotide in position 14 are linked through a phosphodiester linkage"
  misc_feature 14: /note="G is a 2'-fluoro-guanosine (fG)"
  misc_feature 14: /note="The nucleotide in position 14 and the nucleotide in position 13 are linked through a phosphodiester linkage"
  misc_feature 14: /note="The nucleotide in position 14 and the nucleotide in position 15 are linked through a phosphodiester linkage"
  misc_feature 15: /note="G is a 2'-O-Methylguanosine (mG)"
  misc_feature 15: /note="The nucleotide in position 15 and the nucleotide in position 14 are linked through a phosphodiester linkage"
  misc_feature 15: /note="The nucleotide in position 15 and the nucleotide in position 16 are linked through a phosphodiester linkage"
  misc_feature 16: /note="U is a 2'-O-Methyluridine (mU)"
  misc_feature 16: /note="The nucleotide in position 16 and the nucleotide in position 15 are linked through a phosphodiester linkage"
  misc_feature 16: /note="The nucleotide in position 16 and the nucleotide in position 17 are linked through a phosphodiester linkage"
  misc_feature 17: /note="G is a 2'-O-Methylguanosine (mG)"
  misc_feature 17: /note="The nucleotide in position 17 and the nucleotide in position 16 are linked through a phosphodiester linkage"
  misc_feature 17: /note="The nucleotide in position 17 and the nucleotide in position 18 are linked through a phosphodiester linkage"
  misc_feature 18: /note="A is a 2'-O-Methyladenosine (mA)"
  misc_feature 18: /note="The nucleotide in position 18 and the nucleotide in position 17 are linked through a phosphodiester linkage"
  misc_feature 18: /note="The nucleotide in position 18 and the nucleotide in position 19 are linked through a phosphodiester linkage"
  misc_feature 19: /note="C is a 2'-O-Methylcytidine (mC)"
  misc_feature 19: /note="The nucleotide in position 19 and the nucleotide in position 18 are linked through a phosphodiester linkage"
  misc_feature 19: /note="The nucleotide in position 19 and the nucleotide in position 20 are linked through a phosphodiester linkage"
  misc_feature 20: /note="U is a 2'-O-Methyluridine (mU)"
  misc_feature 20: /note="The nucleotide in position 20 and the nucleotide in position 19 are linked through a phosphodiester linkage"
  misc_feature 20: /note="The nucleotide in position 20 and the nucleotide in position 21 are linked through a phosphodiester linkage"
  misc_feature 21: /note="U is a 2'-O-Methyluridine (mU)"
  misc_feature 21: /note="The nucleotide in position 21 and the nucleotide in position 20 are linked through a phosphodiester linkage"
  misc_feature 21: /note="The nucleotide in position 21 and the nucleotide in position 22 are linked through a phosphodiester linkage"
  misc_feature 22: /note="U is a 2'-O-Methyluridine (mU)"
  misc_feature 22: /note="The nucleotide in position 22 and the nucleotide in position 21 are linked through a phosphorothioate linkage"
  misc_feature 22: /note="The nucleotide in position 22 and the nucleotide in position 23 are linked through a phosphodiester linkage"
  misc_feature 23: /note="T is a LT4 nucleotide analog"
  misc_feature 23: /note="The nucleotide in position 23 and the nucleotide in position 22 are linked through a phosphodiester linkage"
  misc_feature 23: /note="The nucleotide in position 23 and the nucleotide in position 24 are linked through a phosphodiester linkage"
  misc_feature 24: /note="The nucleotide in position 24 and the nucleotide in position 23 are linked through a phosphodiester linkage"
  misc_feature 24: /note="T is a LT4 nucleotide analog"
tttttauuaauauggugacuuutt

SEQ ID NO: 630 - RNA, 24 nt, Artificial Sequence
  Forward C027.003#62,#63,#64,#65,#66
  misc_feature 1: /note="T is a lgT3 nucleotide analog"
  misc_feature 1: /note="The nucleotide in position 1 and the nucleotide in position 2 are linked through a phosphorothioate linkage"
  misc_feature 2: /note="T is a lgT3 nucleotide analog"
  misc_feature 2: /note="The nucleotide in position 2 and the nucleotide in position 1 are linked through a phosphorothioate linkage"
  misc_feature 2: /note="The nucleotide in position 2 and the nucleotide in position 3 are linked through a phosphorothioate linkage"
  misc_feature 3: /note="T is a lgT3 nucleotide analog"
  misc_feature 3: /note="The nucleotide in position 3 and the nucleotide in position 2 are linked through a phosphorothioate linkage"
  misc_feature 3: /note="The nucleotide in position 3 and the nucleotide in position 4 are linked through a phosphodiester linkage"
  misc_feature 4: /note="T is a locked thymidine (lT)"
  misc_feature 4: /note="The nucleotide in position 4 and the nucleotide in position 3 are linked through a phosphodiester linkage"
  misc_feature 4: /note="The nucleotide in position 4 and the nucleotide in position 5 are linked through a phosphodiester linkage"
  misc_feature 4: /note="U is a 2'-O-Methyluridine (mU)"
  misc_feature 5: /note="T is a locked thymidine (lT)"
  misc_feature 5: /note="The nucleotide in position 5 and the nucleotide in position 4 are linked through a phosphodiester linkage"
  misc_feature 5: /note="The nucleotide in position 5 and the nucleotide in position 6 are linked through a phosphodiester linkage"
  misc_feature 6: /note="A is a 2'-O-Methyladenosine (mA)"
  misc_feature 6: /note="The nucleotide in position 6 and the nucleotide in position 5 are linked through a phosphodiester linkage"
  misc_feature 6: /note="The nucleotide in position 6 and the nucleotide in position 7 are linked through a phosphodiester linkage"
  misc_feature 7: /note="U is a 2'-O-Methyluridine (mU)"
  misc_feature 7: /note="The nucleotide in position 7 and the nucleotide in position 6 are linked through a phosphodiester linkage"
  misc_feature 7: /note="The nucleotide in position7 and the nucleotide in position 8 are linked through a phosphodiester linkage"
  misc_feature 8: /note="U is a 2'-fluoro-uridine (fU)"
  misc_feature 8: /note="The nucleotide in position 8 and the nucleotide in position 7 are linked through a phosphodiester linkage"
  misc_feature 8: /note="The nucleotide in position 8 and the nucleotide in position 9 are linked through a phosphodiester linkage"
  misc_feature 9: /note="A is a 2'-O-Methyladenosine (mA)"
  misc_feature 9: /note="The nucleotide in position 9 and the nucleotide in position 8 are linked through a phosphodiester linkage"
  misc_feature 9: /note="The nucleotide in position 9 and the nucleotide in position 10 are linked through a phosphodiester linkage"
  misc_feature 10: /note="A is a 2'-fluoro-adenosine (fA)"
  misc_feature 10: /note="The nucleotide in position 10 and the nucleotide in position 9 are linked through a phosphodiester linkage"
  misc_feature 10: /note="The nucleotide in position 10 and the nucleotide in position 11 are linked through a phosphodiester linkage"
  misc_feature 11: /note="U is a 2'-fluoro-uridine (fU)"
  misc_feature 11: /note="The nucleotide in position 11 and the nucleotide in position 10 are linked through a phosphodiester linkage"
  misc_feature 11: /note="The nucleotide in position 11 and the nucleotide in position 12 are linked through a phosphodiester linkage"
  misc_feature 12: /note="A is a 2'-fluoro-adenosine (fA)"
  misc_feature 12: /note="The nucleotide in position 12 and the nucleotide in position 11 are linked through a phosphodiester linkage"
  misc_feature 12: /note="The nucleotide in position 12 and the nucleotide in position 13 are linked through a phosphodiester linkage"
  misc_feature 13: /note="U is a 2'-O-Methyluridine (mU)"
  misc_feature 13: /note="The nucleotide in position 13 and the nucleotide in position 12 are linked through a phosphodiester linkage"
  misc_feature 13: /note="The nucleotide in position 13 and the nucleotide in position 14 are linked through a phosphodiester linkage"
  misc_feature 14: /note="G is a 2'-fluoro-guanosine (fG)"
  misc_feature 14: /note="The nucleotide in position 14 and the nucleotide in position 13 are linked through a phosphodiester linkage"
  misc_feature 14: /note="The nucleotide in position 14 and the nucleotide in position 15 are linked through a phosphodiester linkage"
  misc_feature 15: /note="G is a 2'-O-Methylguanosine (mG)"
  misc_feature 15: /note="The nucleotide in position 15 and the nucleotide in position 14 are linked through a phosphodiester linkage"
  misc_feature 15: /note="The nucleotide in position 15 and the nucleotide in position 16 are linked through a phosphodiester linkage"
  misc_feature 16: /note="U is a 2'-O-Methyluridine (mU)"
  misc_feature 16: /note="The nucleotide in position 16 and the nucleotide in position 15 are linked through a phosphodiester linkage"
  misc_feature 16: /note="The nucleotide in position 16 and the nucleotide in position 17 are linked through a phosphodiester linkage"
  misc_feature 17: /note="G is a 2'-O-Methylguanosine (mG)"
  misc_feature 17: /note="The nucleotide in position 17 and the nucleotide in position 16 are linked through a phosphodiester linkage"
  misc_feature 17: /note="The nucleotide in position 17 and the nucleotide in position 18 are linked through a phosphodiester linkage"
  misc_feature 18: /note="A is a 2'-O-Methyladenosine (mA)"
  misc_feature 18: /note="The nucleotide in position 18 and the nucleotide in position 17 are linked through a phosphodiester linkage"
  misc_feature 18: /note="The nucleotide in position 18 and the nucleotide in position 19 are linked through a phosphodiester linkage"
  misc_feature 19: /note="C is a 2'-O-Methylcytidine (mC)"
  misc_feature 19: /note="The nucleotide in position 19 and the nucleotide in position 18 are linked through a phosphodiester linkage"
  misc_feature 19: /note="The nucleotide in position 19 and the nucleotide in position 20 are linked through a phosphodiester linkage"
  misc_feature 20: /note="U is a 2'-O-Methyluridine (mU)"
  misc_feature 20: /note="The nucleotide in position 20 and the nucleotide in position 19 are linked through a phosphodiester linkage"
  misc_feature 20: /note="The nucleotide in position 20 and the nucleotide in position 21 are linked through a phosphodiester linkage"
  misc_feature 21: /note="U is a 2'-O-Methyluridine (mU)"
  misc_feature 21: /note="The nucleotide in position 21 and the nucleotide in position 20 are linked through a phosphodiester linkage"
  misc_feature 21: /note="The nucleotide in position 21 and the nucleotide in position 22 are linked through a phosphodiester linkage"
  misc_feature 22: /note="U is a 2'-O-Methyluridine (mU)"
  misc_feature 22: /note="The nucleotide in position 22 and the nucleotide in position 21 are linked through a phosphorothioate linkage"
  misc_feature 22: /note="The nucleotide in position 22 and the nucleotide in position 23 are linked through a phosphorothioate linkage"
  misc_feature 23: /note="T is a LT4 nucleotide analog"
  misc_feature 23: /note="The nucleotide in position 23 and the nucleotide in position 22 are linked through a phosphorothioate linkage"
  misc_feature 23: /note="The nucleotide in position 23 and the nucleotide in position 24 are linked through a phosphorothioate linkage"
  misc_feature 24: /note="The nucleotide in position 24 and the nucleotide in position 23 are linked through a phosphorothioate linkage"
  misc_feature 24: /note="T is a LT4 nucleotide analog"
tttttauuaauauggugacuuutt

SEQ ID NO: 631 - RNA, 21 nt, Artificial Sequence
  Reverse C027.003
aaagucaccauauuaauaatt

SEQ ID NO: 632 - RNA, 21 nt, Artificial Sequence
  Reverse C027.003 - #01,#06,#11,#20,#29,#34,#39,#48,#57,#62,
  misc_feature 1: /note="A is a 2'-O-Methyladenosine (mA)"
  misc_feature 6: /note="C is a 2'-O-Methylcytidine (mC)"
  misc_feature 8: /note="C is a 2'-O-Methylcytidine (mC)"
  misc_feature 10: /note="A is a 2'-O-Methyladenosine (mA)"
  misc_feature 12: /note="A is a 2'-O-Methyladenosine (mA)"
  misc_feature 18: /note="A is a 2'-O-Methyladenosine (mA)"
  misc_feature 20: /note="T is a 2'-O-Methyladenosine (mA)"
  misc_feature 21: /note="T is a 2'-O-Methyladenosine (mA)"
aaagucaccauauuaauaatt

SEQ ID NO: 633 - RNA, 21 nt, Artificial Sequence
  Reverse C027.003 - #02,#07,#12,#21,#30,#35,#40,#49,#58,#63
  misc_feature 1: /note="A is a 2'-O-Methyladenosine (mA)"
  misc_feature 4: /note="G is a 2'-O-Methylguanosine (mG)"
  misc_feature 8: /note="C is a 2'-O-Methylcytidine (mC)"
  misc_feature 10: /note="A is a 2'-O-Methyladenosine (mA)"
  misc_feature 12: /note="A is a 2'-O-Methyladenosine (mA)"
  misc_feature 18: /note="A is a 2'-O-Methyladenosine (mA)"
  misc_feature 20: /note="T is a 2'-O-Methyladenosine (mA)"
  misc_feature 21: /note="T is a 2'-O-Methyladenosine (mA)"
aaagucaccauauuaauaatt

SEQ ID NO: 634 - RNA, 21 nt, Artificial Sequence
  Reverse C027.003 - #03,#13,#22,#31,#36,#41,#50,#59,#64
  misc_feature 1: /note="A is a 2'-O-Methyladenosine (mA)"
  misc_feature 6: /note="C is a 2'-O-Methylcytidine (mC)"
  misc_feature 9: /note="C is a 2'-fluoro-cytidine (fC)"
  misc_feature 10: /note="A is a 2'-O-Methyladenosine (mA)"
  misc_feature 12: /note="A is a 2'-O-Methyladenosine (mA)"
  misc_feature 18: /note="A is a 2'-O-Methyladenosine (mA)"
  misc_feature 20: /note="T is a 2'-O-Methyladenosine (mA)"
  misc_feature 21: /note="T is a 2'-O-Methyladenosine (mA)"
aaagucaccauauuaauaatt

SEQ ID NO: 635 - RNA, 21 nt, Artificial Sequence
  Reverse C027.003 - #04,#09,#14,#23,#32,#37,#42,#51,#60,#65
  misc_feature 1: /note="A is a 2'-O-Methyladenosine (mA)"
  misc_feature 6: /note="C is a 2'-O-Methylcytidine (mC)"
  misc_feature 8: /note="C is a 2'-O-Methylcytidine (mC)"
  misc_feature 9: /note="C is a 2'-fluoro-cytidine (fC)"
  misc_feature 10: /note="A is a 2'-O-Methyladenosine (mA)"
  misc_feature 12: /note="A is a 2'-O-Methyladenosine (mA)"
  misc_feature 18: /note="A is a 2'-O-Methyladenosine (mA)"
  misc_feature 20: /note="T is a 2'-O-Methyladenosine (mA)"
  misc_feature 21: /note="T is a 2'-O-Methyladenosine (mA)"
aaagucaccauauuaauaatt

SEQ ID NO: 636 - RNA, 21 nt, Artificial Sequence
  Reverse C027.003 - #05,#10,#15,#24,#33,#38,#43,#52,#61,#66
  misc_feature 12: /note="A is a 2'-O-Methyladenosine (mA)"
aaagucaccauauuaauaatt

SEQ ID NO: 637 - RNA, 21 nt, Artificial Sequence
  Reverse C027.003 - #16,#25,#44,#53
  misc_feature 1: /note="A is a 2'-O-Methyladenosine (mA)"
  misc_feature 6: /note="C is a 2'-O-Methylcytidine (mC)"
  misc_feature 8: /note="C is a 2'-O-Methylcytidine (mC)"
  misc_feature 10: /note="A is a 2'-O-Methyladenosine (mA)"
  misc_feature 12: /note="A is a 2'-O-Methyladenosine (mA)"
  misc_feature 18: /note="A is a 2'-O-Methyladenosine (mA)"
  misc_feature 20: /note="T is a locked adenine (lA)"
  misc_feature 21: /note="A is a locked adenine (lA)"
aaagucaccauauuaauaatt

SEQ ID NO: 638 - RNA, 21 nt, Artificial Sequence
  Reverse C027.003 - #17,#26,#45,#54
  misc_feature 1: /note="A is a 2'-O-Methyladenosine (mA)"
  misc_feature 4: /note="G is a 2'-O-Methylguanosine (mG)"
  misc_feature 8: /note="C is a 2'-O-Methylcytidine (mC)"
  misc_feature 10: /note="A is a 2'-O-Methyladenosine (mA)"
  misc_feature 12: /note="A is a 2'-O-Methyladenosine (mA)"
  misc_feature 18: /note="A is a 2'-O-Methyladenosine (mA)"
  misc_feature 20: /note="T is a locked adenine (lA)"
  misc_feature 21: /note="A is a locked adenine (lA)"
aaagucaccauauuaauaatt

SEQ ID NO: 639 - RNA, 21 nt, Artificial Sequence
  Reverse C027.003 - #18,#27,#46,#55
  misc_feature 1: /note="A is a 2'-O-Methyladenosine (mA)"
  misc_feature 6: /note="C is a 2'-O-Methylcytidine (mC)"
  misc_feature 9: /note="C is a 2'-fluoro-cytidine (fC)"
  misc_feature 10: /note="A is a 2'-O-Methyladenosine (mA)"
  misc_feature 12: /note="A is a 2'-O-Methyladenosine (mA)"
  misc_feature 18: /note="A is a 2'-O-Methyladenosine (mA)"
  misc_feature 20: /note="T is a locked adenine (lA)"
  misc_feature 21: /note="T is a locked adenine (lA)"
aaagucaccauauuaauaatt

SEQ ID NO: 640 - RNA, 21 nt, Artificial Sequence
  Reverse C027.003 - #19,#28,#47,#56
  misc_feature 1: /note="A is a 2'-O-Methyladenosine (mA)"
  misc_feature 6: /note="C is a 2'-O-Methylcytidine (mC)"
  misc_feature 8: /note="C is a 2'-O-Methylcytidine (mC)"
  misc_feature 9: /note="C is a 2'-fluoro-cytidine (fC)"
  misc_feature 10: /note="A is a 2'-O-Methyladenosine (mA)"
  misc_feature 12: /note="A is a 2'-O-Methyladenosine (mA)"
  misc_feature 18: /note="A is a 2'-O-Methyladenosine (mA)"
  misc_feature 20: /note="T is a locked adenine (lA)"
  misc_feature 21: /note="T is a locked adenine (lA)"
aaagucaccauauuaauaatt

What is claimed is:

1. A double-stranded ribonucleic acid (dsRNA), wherein the dsRNA comprises a sense strand comprising a first sequence and an antisense strand comprising a second sequence, wherein the first sequence and the second sequence are complementary, wherein the first sequence comprises a sequence selected from the group consisting of SEQ ID NOS: 6-11 and 310-321, wherein the dsRNA is optionally a small interfering RNA (siRNA) or short hairpin RNA (shRNA), and wherein the dsRNA optionally inhibits expression of a Proprotein Convertase Subtilisin Kexin 9 (PCSK9) gene.

2. The dsRNA of claim 1, wherein the dsRNA comprises:

3. A double-stranded ribonucleic acid (dsRNA), wherein the dsRNA comprises a sense strand comprising a first sequence and an antisense strand comprising a second sequence, wherein only the first sequence and the second sequence are complementary, wherein the first sequence is one of SEQ ID NOS: 3, 4, and 13, wherein the dsRNA is optionally a small interfering RNA (siRNA) or short hairpin RNA (shRNA), and wherein the dsRNA optionally inhibits expression of a Proprotein Convertase Subtilisin Kexin 9 (PCSK9) gene.

4. The dsRNA of claim 3, wherein the dsRNA comprises:
(19)
(SEQ ID NO: 162)
CCAUUGUAGCAUUUUUAUUAAUinvdT
in the sense strand and
(SEQ ID NO: 163)
AUUAAUAAAAAUGCUACAAdTdT
in the antisense strand,
(20)
(SEQ ID NO: 166)
CCAGUAGCAUUUUUAUUAAUAUinvdT
in the sense strand and
(SEQ ID NO: 167)
AUAUUAAUAAAAAUGCUACdTdT
in the antisense strand, or
(21)
(SEQ ID NO: 290)
CCAGAGUGUGAAAGGUGCUGAUinvdT
in the sense strand and
(SEQ ID NO: 291)
AUCAGCACCUUUCACACUCdTdT
in the antisense strand.

5. The dsRNA of any one of claims 1-4, wherein the first and second sequences are each less than or equal to 30 nucleotides in length, and optionally wherein the first and second sequences are each at least 19 and less than or equal to 23 nucleotides in length.

6. The dsRNA of any one of claims 1-5, wherein the dsRNA comprises one or more modified nucleotides;
wherein at least one of the one or more modified nucleotides is optionally a 2′-O-methyl nucleotide, 5′-phosphorothioate nucleotide, or a terminal nucleotide linked to a cholesterol derivative or lipophilic moiety;
wherein at least one of the one or more modified nucleotides is optionally a 2′-fluoro, 2′-deoxy, 2′-O-methoxyethyl, constrained ethyl (cEt), deoxy, inverted deoxy, inverted dideoxy, locked nucleic acid, abasic, 2′-amino, 2′-alkyl, morpholino, phosphoramidate, or a non-natural base-containing nucleotide;
wherein the dsRNA optionally comprises one or more 2′-O-methyl nucleotides and one or more 2′-fluoro nucleotides;
wherein the dsRNA optionally comprises two or more 2′-O-methyl nucleotides and two or more 2′-fluoro nucleotides in the pattern
OMe-F-OMe-F or F-OMe-F-OMe,
wherein OMe represents a 2′-O-methyl nucleotide, and wherein F represents a 2′-fluoro nucleotide; and
wherein the dsRNA optionally comprises up to 10 contiguous nucleotides that are each a 2′-O-methyl nucleotide or up to 10 contiguous nucleotides that are each a 2′-fluoro nucleotide.

7. The dsRNA of any one of claims 1-6, wherein:
(a) the dsRNA comprises one or more phosphorothioate groups, or
(b) the dsRNA does not comprise a phosphorothioate group.

8. The dsRNA of any one of claims 1-7, wherein:
(a) the dsRNA comprises one or more phosphotriester groups, or
(b) the dsRNA does not comprise a phosphotriester group.

9. The dsRNA of any one of claims 1-8, wherein the dsRNA is attached to one or more GalNAc derivatives via a linker; wherein optionally the dsRNA is attached to three GalNAc derivatives via a trivalent branched linker; and wherein optionally at least one of the one or more GalNAc derivatives is attached to the 3′ end of the sense strand, the 3′ end of the antisense strand, or the 5′ end of the sense strand of the dsRNA.

10. The dsRNA of any one of claims 1-9, wherein one or both of the sense strand and the antisense strand further comprises:
(a) a 5′ overhang comprising one or more nucleotides, wherein the 5′ overhang optionally comprises one or more thymines; and/or
(b) a 3′ overhang comprising one or more nucleotides, wherein the 3′ overhang optionally comprises two nucleotides, and wherein the 3′ overhang optionally comprises one or more thymines.

11. The dsRNA of claim 1, wherein one or both of strands of the dsRNA comprise one or more compounds having the structure of formula (I): [chemical structure]
wherein:
B is a heterocyclic nucleobase;
one of L1 and L2 is an internucleoside linking group linking the compound of formula (I) to a polynucleotide and the other of L1 and L2 is H, a protecting group, a phosphorus moiety or an internucleoside linking group linking the compound of formula (I) to a polynucleotide,
Y is O, NH, NR1 or N—C(═O)—R1, wherein R1 is:
a (C1-C20) alkyl group, optionally substituted by one or more groups selected from an halogen atom, a (C1-C6) alkyl group, a (C3-C8) cycloalkyl group, a (C3-C14) heterocycle, a (C6-C14) aryl group, a (C5-C14) heteroaryl group, —O—Z1, —N(Z1)(Z2), —S—Z1, —CN, —C(=J)-O—Z1, —O—C(=J)-Z1, —C(=J)-N(Z1)(Z2), and —N(Z1)-C(=J)-Z2, wherein
J is O or S,
each of Z1 and Z2 is, independently, H, a (C1-C6) alkyl group, optionally substituted by one or more groups selected from a halogen atom and a (C1-C6) alkyl group,
a (C3-C8) cycloalkyl group, optionally substituted by one or more groups selected from a halogen atom and a (C1-C6) alkyl group,
a group —[C(═O)]m-R2-(O—CH2-CH2)p-R3, wherein
m is an integer meaning 0 or 1,
p is an integer ranging from 0 to 10,
R2 is a (C1-C20) alkylene group optionally substituted by a (C1-C6) alkyl group, —O—Z3, —N(Z3)(Z4), —S—Z3, —CN, —C(═K)—O—Z3, —O—C(═K)—Z3, —C(═K)—N(Z3)(Z4), or —N(Z3)-C(═K)—Z4, wherein
K is O or S,
each of Z3 and Z4 is, independently, H, a (C1-C6) alkyl group, optionally substituted by one or more groups selected from a halogen atom and a (C1-C6) alkyl group, and
R3 is selected from the group consisting of a hydrogen atom, a (C1-C6) alkyl group, a (C1-C6) alkoxy group, a (C3-C8) cycloalkyl group, a (C3-C14) heterocycle, a (C6-C14) aryl group or a (C5-C14) heteroaryl group, or R3 is a cell targeting moiety,
X1 and X2 are each, independently, a hydrogen atom, a (C1-C6) alkyl group, and
each of Ra, Rb, Rc and Rd is, independently, H or a (C1-C6) alkyl group,
or is a pharmaceutically acceptable salt thereof.

12. The dsRNA of claim 11, comprising one or more compounds of formula (I) wherein Y is:
a) NR1, R1 is a non-substituted (C1-C20) alkyl group;
b) NR1, R1 is a non-substituted (C1-C16) alkyl group, which includes an alkyl group selected from a group comprising methyl, isopropyl, butyl, octyl, and hexadecyl;
c) NR1, R1 is a (C3-C8) cycloalkyl group, optionally substituted by one or more groups selected from a halogen atom and a (C1-C6) alkyl group;
d) NR1, R1 is a cyclohexyl group;
e) NR1, R1 is a (C1-C20) alkyl group substituted by a (C6-C14) aryl group;
f) NR1, R1 is a methyl group substituted by a phenyl group;
g) N—C(═O)—R1, R1 is an optionally substituted (C1-C20) alkyl group; or
h) N—C(═O)—R1, R1 is methyl or pentadecyl.

13. The dsRNA of claim 11 or 12, comprising one or more compounds of formula (I) wherein B is selected from a group consisting of a pyrimidine, a substituted pyrimidine, a purine and a substituted purine, or a pharmaceutically acceptable salt thereof.

14. The dsRNA of any one of claims 11 to 13, wherein R3 is of formula (II) [chemical structure]
wherein A1, A2 and A3 are OH,
A4 is OH or NHC(═O)—R5, wherein R5 is a (C1-C6) alkyl group, optionally substituted by an halogen atom, or a pharmaceutically acceptable salt thereof.

15. The dsRNA of any one of claims 11 to 14, wherein R3 is N-acetyl-galactosamine, or a pharmaceutically acceptable salt thereof.

16. The dsRNA of any one of claims 11 to 15, comprising one or more nucleotides from Table A.

17. The dsRNA of any one of claims 11 to 16, comprising from 2 to 10 compounds of formula (I), or a pharmaceutically acceptable salt thereof.

18. The dsRNA of claim 17, wherein the 2 to 10 compounds of formula (I) are on the sense strand.

19. The dsRNA of any one of claims 11 to 18, wherein the sense strand comprises two to five compounds of formula (I) at the 5′ end, and/or comprises one to three compounds of formula (I) at the 3′ end.

20. The dsRNA of any one of claims 11 to 19, wherein
a) the two to five compounds of formula (I) at the 5′ end of the sense strand comprise lgT3, optionally comprising three consecutive lgT3 nucleotides; and/or
b) the one to three compounds of formula (I) at the 3′ end of the sense strand comprise lT4; optionally comprising two consecutive lT4.

21. The dsRNA of any one of claims 1 to 20, comprising one or more internucleoside linking groups independently selected from the group consisting of phosphodiester, phosphotriester, phosphorothioate, phosphorodithioate, alkyl-phosphonate and phosphoramidate backbone linking groups, or a pharmaceutically acceptable salt thereof.

22. The dsRNA of any one of claims 1 to 21, selected from the dsRNAs in Tables 2-4.

23. The dsRNA of any one of claims 1 to 22, wherein:
a) the sense strand comprises a nucleotide sequence selected from the group consisting of SEQ ID NOs: 578, 585, 587, 620, 621, 622, and 627; and/or
b) the antisense strand comprises a nucleotide sequence selected from the group consisting of SEQ ID NOs: 589, 591, 631, 632, 634, 635 and 639.

24. The dsRNA of claim 23, wherein the sense strand and antisense strand of the dsRNA respectively comprise the nucleotide sequences of:
a) SEQ ID NOs: 578 and 589; [C027.001]
b) SEQ ID NOs: 620 and 631; [C027.003]
c) SEQ ID NOs: 585 and 591; [C027.001#40]
d) SEQ ID NOs: 587 and 591; [C027.001#58]
e) SEQ ID NOs: 621 and 634; [C027.003#03]
f) SEQ ID NOs: 622 and 632; [C027.003#06]
g) SEQ ID NOs: 622 and 635; [C027.003#08] and
h) SEQ ID NOs: 627 and 639; [C027.003#47].

25. A vector encoding the dsRNA of any one of claims 1-24.

26. An isolated host cell comprising the dsRNA of any one of claims 1-24 or the vector of claim 25.

27. A composition comprising the dsRNA of any one of claims 1-24, wherein optionally the composition further comprises a pharmaceutically acceptable carrier, wherein optionally the composition further comprises a delivery vehicle, and wherein optionally the delivery vehicle is selected from the group consisting of a liposome, lipoplex, complex, and nanoparticle.

28. The dsRNA of any one of claims 1-24 or the composition of claim 27 for use in a method of inhibiting expression of a PCSK9 gene in a subject, wherein optionally the expression of the PCSK9 gene in the liver of the subject is inhibited by the dsRNA, and wherein optionally the subject is a human.

29. The dsRNA of any one of claims 1-24 or the composition of claim 27 for use in a method of treating or preventing a PCSK9-mediated disease in a subject in need thereof, wherein optionally the PCSK9-mediated disorder is hypercholesterolemia, wherein optionally the expression of the PCSK9 gene in the liver of the subject is inhibited by the dsRNA, and wherein optionally the subject is a human.
